United States Patent Application Publication US 2026/0191916 A1 - sequence listing, part 48

SEQ ID NO: 214 - DNA, 3240089 bp, Enterococcus gallinarum (residues 1-1,620,045 of 3,240,089)
  source 1..3240089: mol_type = genomic DNA
atgtcatctgctgattccatttggcgagatcttcagaaatcttttaaagaagaacttaatccagcaagttacagtgcttggatcgaaacagccaacatattatcttttgaaaaaaatcagttattgattgaagtacccagtgatcttcataaatcttattgggaaaaaaatctagctgcaaaaattgttgagatgggcttcatgaagaccggtgaagaactaattcctagttttgtcactgctgaagaagcagaagctctgcaaaaatcgccttctgttgaacaaacagttactgaaaaagcagaaaaaaaaggaaaaactattctaaacgaaaaatatacttttgatacatttgttataggtaaaggaaatcagatggctcatgctgcagctttagttgtagctgaagatcccggttctatctataatccgttattcttctatggtggtgtgggtctaggaaaaactcacttgatgcatgctatcggacatcaaatgctgttaaaaagaccaaatgcaaaaatcaaatatgtgagcagtgagaacttcactaatgattttattacttcgatccaaaagaataaaatggaagattttcggaatgaataccgaaatgttgatctcttacttgttgatgatattcagtttttggtcaataaagaagggacacaagaagaattctttaatacatttgaagagctttatcgaaataacaagcagatcgttttgacaagtgatcgcttaccaaatgaaatacccacgttacctgaacgattggtttcacgtttcgcatgggggttatctgtagatattacacctccagatctagaaactagaacagcgattttaagaaaaaaagcagaagctgaacgcctcgaaatccctgacgatacactgagttatatcgcaggacaaattgattcgaatattcgggaattagaaggcgcattagtgcgtgtacaagcatttgcaactatgcaaaattcggatattacaacaagcttagctgcagaagcaatcaaagcattaaagtcaagtcatggaagcactcaagtttctatattgcaaatccaagaggaagttgcaaaatactaccatatccatataaatgatctcaaaggaaaaaaacgtgtcaaaggaattgtcgtacctcggcaaatcgccatgtttctttctcgtgaactaacggataactctttacctaaaattggagctgaattcggaggtaaagatcatactacagtcattcatgctcatgaaaaaatccaacatctttcagaaacggatcctaccattaagaatgaaatttcagaaatcaaaaacattctctttagttgagttgtggataaagcaaaaacatgtcaaaaagttatgcacaggttatacacaggcgttttcgttgacgtctcaatgatattttctagttatccacaatactaacaagcctattactactattaccttatttaataactataaataaaaggagtgctcctaatgaaagtaactttaaatcgaacagagttcatgcaagaattacaaaccgttcaacgtgccatttcatcaaaaactaccataccgatccttacaggtgttaaattagttctaactgataaaggtttaactctgacaggaagtaatgctgatatttcaattgagacttttttaagcgtagagaaagaaaaagttcaaatgaaaattgaacaaacaggagcaattattttacaagcacgattttttagtgaaatcattcgtcgcttaccggataatactgttacgctggaagtgatagaaaataaccaagtagcaataacttcagggaaagctaactttactgtaaatggattagatgctgatagttatccacatttaccagttgtcgaaagtcaagatcgcatcgaagttcctgctcacattctaaataaaattgttaacgaaacagtttttgctgtttcacagcacgaaagtcgtccaattctaaccggtgttcattttgttcttgaaaataagaaattattagctgtagctacagattcccatcgattaagtcaacgagtaattccattagaaagtggggaagcgaatttcaacatcgttattcctgggaaaagtttgactgaattgtcccgttctttaacagatgaagaagaagctattcaaatcagtatcatggataatcaagtattgttccaaaccaatacaatgaagttctattcacgcctattagaagggacttacccagatacaaatcgattgataccatcaagttttaacacagaaattgaattttcagttccagaattgttgtcagccatcgaacgcgcatctttactttcacatgaaggaagaaataacattgttcgtttgtcaataaatgaaaattctgttattttatatgggaattctcctgagattggtaaagtagaagaagatctatcctacgagcaagtttcaggagaaccattggaaatctctttcaatcctgattacatgaaggcggctctaagagcttttggagatacaaacatcacgattcgctttatttctgctatcagaccattcactttggaaccaactgaaagtcaaggaagctttattcaattgattacaccagtccgcacaaattagaatttttcatatttattgtaaatgcatgaaacaaacgtctgaaaatacaaaaatagtttagaagggcttaaaatcgattttaagcccttctttttgtttttgcttattttttatctaaaacaatcaaaacttctcagaatgaaaattatacggataaatttgttttattccttaaaaaagagtataataatggtatacgttcttctatagaatcgagggataatatgaaaatgcaaatacctttagaaactgaatatatgacgttaggacaaatgttgaaagaagtcagcgtaatcagcagtggaggacaagcaaaatggttcctagctgaacatacggtacttgtagacggagagccagagaatagacgaggccgcaaattatatgcgggaatgaggattgagatacctgatgagggtactttttttatggtaaagaaggaagcctcagatgcgtctgaataatcttcagctaaataattatcgcaactatgaatctttggaattatctttcgataaaaatcttgtcatttttttaggcgagaatgctcaaggaaaaaccaacgttttagaaagtatttatgttttagcgatgacaaaaagtcatcgaactacaagtgaacaagagttgattcgttgggatacagctggggctcaagttagcggagctgtgtctcgagggcattctaccataccattagaattatttttaactaaaaaaggtcgtaaaacgaaagtcaatcatattgagcaaaaaaaacttagtagttacatagggcaattgaatgtaattctttttgcccccgaagatctttcacttgttaaaggaagtcctcaagtaagaagaaaatttatcgatatggaaattggacagattgatccgatttatttgtatgatcttgtgcaatatcaaagtgttttgaaacagcgaaatcagtatttgaagcaattatttgaaaaaaagcaaaatgatgagctctatctcactgtgttgactgaacaattgattgaatttggcagcaagatcatttttgcacgacaacgttttgtaaaacgattagcattttgggccaatcaactccatcaaaaaataagtgatgaaaaagaagttttacaaatagaatacttgtctagtgttggtactgtaagtgcatctctagaacaagttcaacaacaattcaaagatgcactggatcaagtgaaaacacgtgaaaaaatgagacagatttctctagtgggtccacaccgagatgatctcaactttttaatcaatgataggaatgttcaaacattcggatcccaaggtcaacagcgaaccactgcattaagtgtaaaattggcagagattgatttgatgaaagaagaaacgggagaatatccgattcttttgttagatgatgtcatgagtgaattagacgattctcgtcagttacacttactagaaacaattgaaggaaaagtacaaacatttattaccacaaccacacttgaacatgtaaaagataaaatgtctgttgaagcagagattttttacgtagacaaaggacacataaaaggagaatagactgaatgacagaagaagaaaaaagtttagttgaacgtgccaaagaatatgacgccagtcagattcaagtcttagaaggtttagaagcggtacgcaagcgtccaggaatgtatatcggatcgaccagttcagaagggctccatcaccttgtgtgggaaatcgtagataattcgattgatgaagcacttgctggttttgctacagcaattcaagtaattatcgaagaagataatagtattactgttgtcgatgacggtcggggaattcctgtagatattcaagcaaagactggcagacctgctgttgaaactgtatttactattcttcatgcaggtggaaaatttggcggtggcggatataaagtttcagggggtttgcatggtgtaggttcttcagtggtaaacgcattatctaccacattagatgttaaagtatacaaagaaggcaaagtttattatcaagaataccatcggggagctgttgtcgaagatctaaaagtgattgacgaaacagatcgtcatgggactactgttcactttgtaccggatcctgaaatatttacagaaactactgtttttaactttgataagttggctacacgtgttcgagaattagcttttctgaatcgcggcttaaaaatttcaattgaagataaacgagaagaacatcctgttctgaaggaatatcattatgacggcggaattaaaagctacgttgaacacttaaatgcaagtaagacagttatttttcctgaaccaatctatcttgaaggggaacaacagggcatcacggttgaagtttctctacaatacacagatagctatcataacaatttgctaagttttgctaataatattcatacgtatgaaggtggtacccatgagtctggattcaagacagctttgactcgggttatcaatgactatgcacgtaagtctaagctaatgaaagaaaatgatgagaatctaacaggtgaagatgttcgagaaggtcttacagcggttatttccatcaaacatccagatcctcagtttgaaggacaaacaaaaacaaaattagggaactcagaagtgcggactgtaactgatcgtttattttcagagcatttcacaaaatttttgatggagaatccagcagttgggcgccaagtagttgaaaaaggactgctagcctctaaagcacgtcaagcagctaagcgtgcgcgtgagatgactcgacgtaaaggtgctcttgaaattagtaatctgccaggtaagctagcagattgttcaagtaatgatcctgagaaatgcgaattatttattgtcgaaggagactcagctggaggatcagctaaacaaggacgaagtcgtgaattccaagcgattctgcctattcgagggaaaattttaaatgtcgaaaaagcaagcatggataaaattttggcaaatgaagaaatccgttcactatttacagcgatgggcacaggatttggagcagactttgatgtttctaaggcacgttatcataaattagtaattatgactgatgccgacgtcgatggcgcacatatccgaacattgctattaactttattctatcgctatatgcgaccaattgttgaagctgggtatgtttatattgctcaaccaccactttatggggtaaaacaaggaaaaaatatccattatatccaaccaggcaaaaacgcagaacaagatttgaagaatacaatcgagtcattgcctgcaacgcctaaaccaagtgttcaacgatacaaaggtttaggtgagatggatgaccatcagctttgggaaacaacaatggatccggaaaaccggatgatgctccgtgtaagtgtagacgatgcaattgaagcagatcaaatttttgaaatgctaatgggcgatcgtgtagaaccaaggcgtgcctttattgaagagaatgcacattatgttaaaaatcttgatatctagccaatcgtaaaggaggaaatagcttgagtgaagcaaaacaaaatattcatgatgtcaatctgacaagtgaaatgcgtgagtcctttatcgattatgcgatgagtgttattgttgcaagggccttgccagatgttcgagatggactaaaaccagttcatcgtagaattttatatggaatgaatgaattaggggttacaccagacaaacctcataaaaaatcagcccgtatcgtcggtgatgtaatgggtaaatatcaccctcatggtgatagtgcgatttacgaatcaatggtgcggatggcgcaaccgtttagttatcgttatatgttagtggatggtcatggtaactttggttcagtcgatggtgatggtgctgccgcgatgcggtatactgaagcccgcatgagcaaattagcaatggaaatgctaagagacattaataaagataccgtcgattttcaaagtaattacgacgatactgaaagagaacctgcagtattgcctgctcgttttcctaatctcttagtcaatggtacaacaggtattgcggtaggtatggcaacgaacattccaccacataatttgaatgaagtaattgcggctattgagctgctaatggaaaatcctgaagtaacaacgaatgagttgatggaagttttgcccggacctgattttccaacgggcggcctagttatgggtaaatcaggtattcgacgggcctatgagacaggtaaagggtccattacggtacgaggaaaagttgaagttactgagatgcctaatggtaaagaaagaattctagtcaccgaattgccgtacatggtcaataaagcaaaattaattgagcggatttcagaacttcatcgagacaaacgaatcgaaggtattacggacttgcgcgatgaatcttctcgagaaggtatgcgtattgtgatcgatgttcgtcgtgacgttagtgcttcagttattttgaacaacctttataaaatgacggctcttcaatcatcttttggctttaatatgctggcgattgaaaaaggcgtaccaaaaattttaagtttgaaacgaattttagaaaattatatcgagcatcaacaagaggtagtaacgcgtcgtactcaatttgacaaaaacaaagcagaagcacgtgctcacatcttggaaggattacggattgctcttgatcatattgatgaaatcattgcattgattagagcatctaattcagatgatgaagcaaaaaacacaatgatggaacgtttcagtctatcagatcgacaagcgcaagcgattctagatatgcgtttgcgtcgtttaacaggattagaaagagacaagattgaaaatgaatatcaaagtttgttggaattgattgctgacttaaaagatattttagctaatcctcagcgagttttagaaattatccaaacagaattgcaagaattaggtcaacgctttggtgatgagcgccgaacagaattacttgttggagaagtattgagtcttgaagatgaagatttgattgaagaagaagaaattgtcattacgctgacaaataatgggtatatcaaacgagtagcaaattctgaatttcgggctcaacgtcgtggaggtcgtggtgttcaaggcatggggattcacgatgaagactttgttaaaacgttgatttcttgttcaactcatgatactttacttttctttactaacatggggaaagtttataaagctaaaggatacgaaattcctgaatacggacgagctgctaaaggtattcctgtgatcaatcttttaggtattgattcaaacgaacgcatcgaagcgattatctctgcttctggaggacctcaagaaggacgttatctgttcttcacgacacggctaggtatagtaaaacgtacatcagttactgctttctccaatattcgggccaatggattgattgctattgggttacgcgaaaatgatgaattagttaatgtagtagaaaccaatgggcaagatgtgatgattattggtacacacaatggctattcagttacatttaaagaagagctggttcgagatatgggacgaactgctgcaggcgttcgaggcatccgtttaagagaagatgactatgttgtcggcgcttctgtgatcaaagaagatagtgaagtattagttatcacagagaatggctacggaaaacgtacaaaaggttcagaatacccaataaaagggcgtggtggtaaaggaataaaaactgcgaatattactgcgaaaaatggaccgttagctggattgactacagtttcaggcaaagaagatatcatgctaattacagacaaaggtgtcattatccgatttaacgctgaaacagtatctcaaactggacgtgcaactttaggcgttcgcttaatgaagatggaaaacggagcgaaagtagtcacgatggccactgtagatccggaagtttctgaaacagaagaagaaatatcttctgaaagtcagaatgatgaatagtaatgtaactccaacacgatgttgttggagtttttttaataaatgaaaatattttgtgcgtacttattgatgcaagcaattttactgtcaaaagtcaaaaaattaatcttgtattatggatgaaaaaaatgtataattggtatttgtgagtagtctaatcaggcgactctctctgctcctagaatatactaggggcctaagaccacagggaggtgaataatcaatggaaaatacgaagtatgagatcttatacatcattcgtccaaacattgatgaagaagcaaaatctgcattgatcgcacgttttgacacgatcttgacagataacggagctgaagttatcgagtctaaagattggcaaaaacgccgtctagcgtatgaaatggatggattccgtgagggtatctatcacatcgttaaagtttcttctccatcaaatgcaagtgcaatcaatgaatttgaccgtcttgctaaaatcaatgacgatattatccgtcacatgattgtcaaagaagaagaataaaattgtttcacatgaaacaaagcgatgaggagatgatgaactttgattaataatgttgtattagtaggaagattaaccaaagatcctgatttacgatacactgctaacggcactggcgtcgcgtcttttacattggctgtaaatcgtaattttacaaaccaaagtggagaacgtgaagctgatttcatcaattgtgtgatttggagaaaacctgcagaaacactggctaattatgctcgtaagggtacattacttggtgtgactggaagaatccaaacacgttcttatgacaatcaacaaggacaacgtgtatatgtaactgaagttgtagcagacaattttcaattgttagaatctcgaaatgcttctgaacaacgacgcactaccgaaagcggtggaaatacttcgtataatactagtggttcttctggattcggaaacaatagcacaaatcaaaatcaatcctctcaaccatcaggaatgcctaactttgatcgagataattctgatccattcggaaactcgtcaattgacatttcagacgatgatttaccattctaataaattgataggagggaaatagaatggcacaacaaagaagaggcggacgtaaacgtcgcaaagtagactatattgctgcaaatcatatcgaacacatcgattataaagatacagaattgttaaaacgtttcatttctgaacgtggaaaaattttgccacgtcgtgtaacaggtacaggggctaaaaaccaacgtaaattaactgttgcaattaaacgcgcacgtatcatgggattacttccatttgtaggcgaagaataatttttactattcaaaagttgacaactgtttttgacagttgtcaactttttttgtatatactattactaaaaacatttagtgtatttgttatttaattcaatctttaaataacgaaaaaatctttgccggtatttgatttgtggtttcctaaataaagtttcacgtgaaactttatttaggaaatcgcttattcgtataagatgtggtaaaatataaaagtgtttaatatttctatagcagtttattgaggagttaaattatgtcagcaatcggacttatttcaattgataactatgatgatctaattgacaaaaaagatgacaaacaaatatcctacttgaactctttgatcacgacgctgatttcagattgggccagtgaaaatcatatcttttataagcggattaattctgaacgctttctttttgttgccaagattgaagatattgagaagatgaaaaaagggaattttgaatttttgacacgtgttcgtaatattgctgaaaagaatgacttagccttaaccattagtatgggaatctcttacggagaagaatcgctagagacaataggcgaagtagctcaaaataatttagatatcgccttggtacgtggtggggatcaagtggtactgaagaaagctgatgaggaagcaaaaccacagttttttggggggaatacagatggtacgcccaagagaactcgtgttcgctctcgggctatgagtactacattaaaaaaaatatttgctgataataaaaaggtatttatcatgggacacaggtaccctgatatggatgctttaggtgcagcctttggagttgcttatatggcaatgatgagtgaacgtgaatgttacatcattttaaatcctaaagaaattactgcggatattgaacgggtattagaagaattgaagaaatatcctgatttagaacgaattgttatttcaggtgaggaagctgtaactttatccaatgaggaaagtgtcttagtaatggttgattatcataaaccgtctatgtcaatctcacaaaaagtttatgatgtatttgataaaattgctgtaattgatcatcaccgtcgcggagatgagtttccagataagccgttgttgacttatattgaatcaacagcatcttcggcatcagagttagtcgctgagttgatacaatatcgttctactcgcaaaacacaaattcccaaatttatcactacttctttattggcgggaatttatgtcgatacaaagaatttctctgttcgaacaactggtagaacttttgatatagctggatacctcaaaaatcatggtgcggatacttcacttgttcaatatatgcttagtacggatttagactcctatttaatgattagtgaactagtttctaaaagcaaacattacaaagaagatatcgttatcgcagtagctgatgataaacgagtatatgacagtgtgacagtcgctaaggcagcggatacgcttttatcaatcaatgggattcatgctgcttttgtgatcacaaggcagcctagtaagttgatcggtattagtgctcgaagcactggcaaaatcaacgtgcaagttttaatggaagcacttggtggaggaggccacttcacaaatgcagctactcaaatcaaggataaaagcttggatgaagtcaaaaaaatgttaattcaagaacttaacaagttagaaagagaatgaggagtgaccacagatgaaagttattttcttgcaagatgttaaaggaaaaggaaaaaaaggagatattaaggatgtaccaaatgggtatgcacaaaacttcttaattaaaaacaacttagctaaaccagctaataatgaaagcatggccgaattaaaaggaaaacaaaaagcacaagaaaaacatgaagcggaattactggcggaggctgaagaactaaaaacagtccttgaaaaggaagaaacagttgttagaattaaagcgaaagcaggagaagatggtcgattgtttggttctattccatcaaaacaaattgctgatgctttgaacaaacaatatagtataaaattggacaagcggaaaattgagttagaacaacccattcgggcattaggttatacaaaggtgcccgtcaaattacattctaaagtaactgctacaattaccgtccaaacggtacaagaataaaaagtttcccaacagtaaaatgttgggtttttttaagcggatatttttgtaatcgaggttctcttgtgctttgatttgatatcctgtagaataaatgaacactagattaggagcgaaagtcatgaatgaagtatggcaaaatcaaattccgcctcaagacattgaagctgagcaagcggttttaggagcaatctttttagacgcggattcaattattgatgcgatggaaattattgaaccacaagatttttatcggcgcagccatcagattatctttcaagcgatgattcaactcaatgatcgtaatgaatccatcgacctaatcacattgaaagcagaaatagaaaaaagtaatagtctggaagatatcggcgggcttacttatttaacagaacttagccaagcttctccttcggccgctagtattgcttattatgcaaaaatcgtggacgacaaagcgactttacgcaacttgattcaaaccgctagtcgtatcgtgacaaaggggtttgaacaagatgaagatgttcaatcgattgtcgatcaagcagagaaaagcattttagaggtttcagaaaaaagaaatagcaacggatttcagtctattgctgatgtgttaaatcgaacaattgaaaatattgatcagttagcgcaaaataacgaagaaattaccggattgcctactggctatgcagctttagataaaatgacagctggacttcaaaaagaagagctaattattttagcagcacgtcctgctgttggtaaaacagcttttgcactaaatatagcacaaaatgtaggaacaaaaacagatcgttctgtcgccatcttcagcttagagatgggtgcagaatcattagtcaatcgaatgctatgtgcggaaggatctattgaagccagccatttacggaccggtcaactgtcagaagaagagtggcgcaatttgatcgtggccatgggaagtttgtcgaatgctagtatttatattgatgatacacctggaatcaaaatttccgagattcgagcacgttgtcgtaaattagcacaggaaaaagggaatttgggtttgatattgattgattatttgcaattgattgaaggtacaggaagagaaaaccgtcaacaagaggtctctgagatttctcggcaattgaagaaattagccaaagaattaaaagttccagttattgcgctttctcaattatcacgaggggtggaacaacgccaagataaacgtccagttttaagtgatattcgtgaatctggatctattgagcaagatgcagacattgttgcatttctctatcgagacgattactatcaacgtgaaggtgacgaagaggatggcggtgaagagccgcaaaacaataatgtcattgaagtgattattgaaaagaacagaagtggagcacggggaacagttgaattattgtttatcaaggaatacaataagttttcctctctatctccaagagttgagtttgcataggataggttgcgactggtactattgccggtcgcttttttttattcgtatttagctttgtataaaaaaaataaataaaatatagttcgtttttttctgctttttttcattttaatgaattcaatcattcgattttagattgaatccatgatcgaatactggtacaatacttatggagtgcaatatataaagaaagaggtcattaaatgtcatctgtagtagtagtaggtacccaatggggcgatgaaggaaaagggaagattaccgactttttgagtgaaaatgcggaagtgattgcacgttatcaaggtggagacaatgcaggacatactattaagtttgatggagtgacatataaattacacttgattccatccggtattttttataaagataaaattagcgtgatcggaaatggcgtagttgtgaatccaaaatctcttgttaaggaacttgcctatctaaaagagaataatataataacagataatttgaaaatttctgaccgtgcccatgttattttaccgtatcatatcaaattagatcagttacaagaagatgctaaaggtgacaataaaatcggaacaacgatcaaagggattggtccagcttatatggataaagccgctcgtgtaggtattcgaattgctgatcttcttgataaagaaatttttgaagaaagattacgtatcaatcttgaagaaaaaaatcgtcaatttgttaaaatgtttgatgatgagccgattgcttttgaagaaatttttgaagagtattatgaatatggtcaacaaatcaagaaatatgtaacggatacttcagttattctaaacgatgcgctagatcaaggaaaacgcgtactgtttgaaggtgctcaaggagttatgctagatattgatcaaggaacatatccgttcgtaacatcctcaaatccagtagctggtggagtaactattggtagtggagtgggtccttctaaaatcaataaagtagttggtgtttgtaaagcatatacttcaagagttggtgatggcccattcccaacagaactttttgatgaaacaggcaatcaaattcgtgaagttggccgtgaatatggtacgacaactggtcgtccacgtcgtgttggttggtttgactctgttgtcatgcgtcattcaaaacgtgtttctggtatcacgaatctgtctctaaattcaattgatgttttgagcggcttggaaactgtaaaaatttgtactgcttatgaattagatggagaattgatttatcattatcctgcaagtctaaaagaattgaatcgttgtaaaccagtctatgaagagttaccaggctggtcagaagatattactggatgcaaaacattagctgatcttcctgaaaatgcacgtaactatgtacatcgtatctctgaattagttggggttcgtatctcaacattttcagtagggccagatcgtaatcaaacgaatatattagagagtgtttgggcacaaatctaatcagtgggtagaattaattagtagaattgaatagtagaaagaacaaggcagagtattttagaagaaaatcgatgattttcccgtcttcaagtatgatttcttctgccttgttctttttttgctataataaggttatcaaagggggtgtacctatgtatcaaatcattacagattcatgttgtgatctaccagcaaaaagattagctgaattgggtgttcaatatatatctatgacaattgaacttgaaggaaaagaatatatcgatgatatgggtgaacaatttgatgccaagtggtttttagaaaaattaaaagaaaatgcacaaccgacaacttctcaaatcaacgtcggacgttatgttgaattttttcgtccatatgtagaatcgcacacaccgatactttatctaggtttttcgtctggaatgagcggttcttttcaaagcgctgttcaagctgttgctattcttaaagaagaataccctcatgctgaaatcacactcattgatacaaaatctgctagtttgggagagggttttttagtagcggaagcagcaaaaagacaaagtgaaggttggtctcttcatgaggtcagccagtgggtagaagaacataaattatctctagattcttgggtgacagttgatgatcttcgacatcttgaaagaggcggtagaatatctaaaacagcagcggccattggcggcctattaaatgttaaaccaattattactgtagatacagatggaaagttgaaaaatgtcgataaagtgagaggtcgaaataaatcaattcaaaaaattgttgataaaacagtagcgaatctgcgtgaatctcaaatagagacggtgtatcttgcaaatgcaggtgatgacgaagcagcagaaaaagtgttaagactcttgaaagagcaatttccagcattaattatttatcattaccctttaggaccaacaattgccagccatacaggatatggttgtttggcacttttttcattcggaaaaacacgtttgatcagtgattgattttctcttaaatataaaagccaaatgcaagagttcttgcatttggctttttcatttggagatcaattatataattcttgaattctttgttgtacatctttgttgtctaagaactcatcataggtagtctctgcacgatcaacaacacctttatttgaaacggcgataattcgatttgcaagcgtttgaataaattgatggtcatgagaggcaaaaagtaaagagccggtaaaagccataaggccatcattcaatgcagtaatcgattctaaatctaagtgatttgttggatcgtctaagacaagaacattagcttttgatagcattagttttgataacatacaacgaactttttcgccacccgatagaacattgactggttttaagacttcatcacctgaaaacagcatccgacctaagaaactacgtaagaatgtattatcatcctcttctttactagcatactgacgcaaccaatcaacaattggtgtatccgtatcaaattcaccagtagtatcttttggcaagtaagcgtgttgtgttgtaacaccccagcgtacactaccagtatctggcacgatctcgcccataataactttgaataatgtagtcgttgtgatgtcgttgttggcaataaaagcaactttgtcatctttattcaaagtgaatgagatattatctaaaatctttttaccgtcaatagtcacactgacattatctacttgcaacaagtcattcccaatttcccgttctggtttaaatcctacaaaaggatagcggcgtgaagaaggttgaatatcatcaagtgtgattttatccaacattttctttcgagaagtggcttgctttgattttgacgcgtttgcactaaagcgggcaataaattcttgcagttctttgatttgttcttcttttttcgcatttgattgtgattgcaattttgctgctaattgacttgattctaaccaaaaatcatagtttccgacatacagtttgatcttcccaaaatctagatctgccatatgggtacatactttatttaagaagtgacggtcatgggaaactacgataacggtattatcaaagttgattaaaaattcttctaaccagttaatagattggatatccaatccattagtcggctcatccaagagcaagacgtctggttttccgaaaagagcttgtgctaacaacactttcacacgttgaccagctgttaattctttcatttggacatggtgtaattcatcagggatattcaacccttgtaagagaactgcggcttcaggttcagcttcccaaccatccagttcagcaaactctccttctagttcagcagcacggataccatcttcgtcactaaagtcttctttcatgtagatcgcatctttttctttcattacgtcgtataatcgtttgtgacccatgataacagtttcaataactgggtattcttcgaagtcaaaatgattttgtttcaaaacagccattcgttcatcgggtcctaatgaaacatttcctgtagatggttggatttctccagataatatttttaagaaagttgatttaccagcaccatttgcaccaatcaaaccatagcaattgccaggcgtaaacttaatattaacatcgtcgaacagtttgcgatctgaaaaatgcaaacttacatcacttactgtaatcaattcttttcctcactttatatatattgacattgagtctcctagcattatagcgatgaatgttgaaagtttcaagtaaactcaaggatttccctacaatcaaacaaggagcttagaattattttgagtaaaacaaaaggctagaatcaagcgttttcctatgctagagtaaagggagaagataggaggagagaaatgttttggttgaatggttaatgcaactgtccccgtggcagcaggctttggctggtactttatttacatacgccatgactgctctaggtgcggcacttgtttatttttttaaggatatcaataaaaatgttctgaatacgatgttgggattcgcttccggtgtaatgattgctgcgagtttttggtcattactagaccctgctatcgctcgtgcggaagaaaatggggatatcccatggcttgtggttagtattggttttggattgggtggactatttttatatgctgcagacaaaacattaccgcatatgcactttggtcctaaccatgaaacagaaggctttccaagccatttaaaacgaacgattctgttggtattctccatcacattacacaatattcctgaaggcttggcagttggtgtggcttttggagcagccgccagctcggaagatcctcgggcagcagttttggcagctatttcagtagctataggtattgggatccaaaattttcccgaaggagctgctgtatctattcctttaagacaggaaggattgagtcgtaataaggcctttgtctatggacaagcttctgggatcgttgaaccgattgccggtgttataggcgctttgctggtaacaagtatgacagccgttttgccatatgctttagcatttgcagcgggagcgatgatttatgtagtggtagaggaactaatacctgaagcacaacaaacagctagtagtcgacggcattttgcagtttttggtgttatgacaggcttcattctgatgatggttttggatgttgctttaggataatcaaaaaagacttggaacagataatgctccaagtctttttgttagttatagtatttttttggtcgttgtcgaacgtttgtcagccaccgaacaattagaacagctaacaataaaggaataccaaaacgaaaaattaaaccaatcaatccgccaattaatcctaagacgagagataagagcaatgaagccagaactaaaactgctacaacagttacgattttacctaacaaactttgtgtattcataataaatcctcctatgcctttttcttaaatttattttatcaagaaagaagaggtggaacatccatcttaaggcggaattttttctccgtcggtagtcaaagagatgttagtgaggtaaactggtaaaaaaaagcaggtgagaacatgaaagcaattatcaaaagtaaacattttattacggaaggagggtgcaatgcttgccaggcctttgagttagaaacgtttacgatgcacttagagaatggtaaagaagtttctgtagaaaatctggacgtagcatctttagtaatgccacttatccaaaatgagcattggcagacagcgctattattagacgaagaagagggctacatttttcgaaaagagaatcaagaagtgaaatttgtggataatgatgctacacaagtatttgtttcaaaagaacaaagaattgtttgtcagaaaaaagcctgtgatcaggaattgtttacagaagcaaatacagttttacagcaactcttcgctatggaaccagttgaatttgtaattgaacaagcataatcaatcagaaaagcagcttgaaaaagaaactttcaatcaaaagtgaaaatcacttaaagattgaagtctccggaatcaagcagcttttttatttacgtatttgaccttctccatagataatatatttggtggaagtcagagcttcaagtcccattgggcctctagcatgcaatttctgagttgaaatgccgatttctgctccaaaaccaaaaacaaacccatccgtgaatcgtgtagatgcattgacatatactgcagcagcatctacttcttgtaagaatttctgagaggcaaagtagttatccgtgacgatagcttcagaatgcttagtgttgtaatgattgatgtgggcaattgcttcatcgatggaatctacaactttgatggctacaatataatctagaaattcggtttgccaatcttcttcagtagcaggttgcgcatttattaaatagttacgcgcattagtatcagcacgcaactctactttattttttagttctttttctagtaaagatagaaagtctgctgcacaacttttatgaacgaggatcgtttcgattgcattgcaaacagaaggtcgctgagttttggcattgacaacaatgtcgacagccatcggaagctgtgcatctttgtcaataaagatatggttgttacctgttcctgtttcaatgacaggaactgttgctgtttctttgacacgacgaatgaggttagcaccgcctcgtggaatcagtacatccaagtatttgttcaagcgcatcatttgatcagccactgcatgactggtgtcatcaacaaattgaatagaatagggtgaatatccattggcgcttaatgtttcttgtaaaagatttacaaggatttgatttgagtagaaggcttctttacctcctcgcaaaatgacagcattcccagatttgaaacatagaccggcagcatctgttgtaacattgggtcttgcttcataaataattcccacaacacctaatggtacacgttgtttaccaattaagagattatcactattgcgccacattttgtccacgattccaagtggatcagggagctgaacgatttttcgaataccagttgccatctccttgattcgttcatcagttaattctaggcgatcaattaaagttgaatttaatgcatttttttttgcagcagcaaggtcttttttattttctgttaaaattcgtgaacgatttctttcaagtgtatcggccatagctgatagtaagtgatttttctcagtagcggttagtaagctaagtgaggccgcacttttttttgcttgctttcccaattgcattaaatcgatcataatgtttcctccttgtaaaagtaagtgccaacctttttgccagctaagatatcaaaaatgattttaggctgtttcccattcgccaagatcattgtggcatctgttttgagaatacgatccgcagcttttaatttgcttgacatgccaccagttccatacggacttccttttccggttgcttgtttcattaaatcaggtgtaatctcagtaatttcatcataaagtttagcagttttatgatgtagcggattagcagtataaaacccatcgatgtcggatagcataatcaacagatccgcatggactaattgcgctacaattgcagataattgatcattatcaccaaatttagtaagatggtccaactcatctatggcaactgtatcattctcgttgattattgggataattcccatcgctaagagctgctccaatgtattacatacattttctcgactttgaggaaactcaataatatctcgggtcaacaataattgagcagttttttgattgtaaacttgaaaacggtgattgtaaatattcattaattcggcttgccccacggctgcaacagcttgttgctgggggatttctacaggacgttgtggaatgtttagtttattcatccctacaccaatagcaccagaagaaacgagaataatctctttgttttgattctttagatcggacagaacaaaagccagttcatcaatactcgagaagttgatatttccattgggatagacgagggaactggtcccaattttgataacgactcgattcgctttttttagtttctctcgcatggatgtaaccacctcttctgaattcagtaaataatattttttctattgtactagcaaaatagcctttcgtcatgtcctttttctattttcttcgtttttttgactgcggaagcgaagaaaatataaagagtttctgataattttgttttcattaaagaaaacaagggttactatgctaaaatgactatatgtttattaattggaggaaaagatgaagacacgtggatttgaaattgtttcaacatatgcagataaggatatagctcttccgcaacgcgcaacacaccatgcggcagggtatgattttgaagcggcagaagaagtcgtaatacctagtatatggaaagcggggttgatgaatggcatccaagcgttgacagctaaagatgttcaaaaagcaatcaaaccgacactggttccgactggaatcaaatcatatatgggaaaagaagagtatttacaattaacgaatcgttcgagcaatcctctcaaacgttttttgttactaacaaatggtgtcggagtcattgacagtgattattacaataattctgataatgaagggcatatcatgtttcaatttacgaattttggtcccagtgatttgaccatcaaaaaaggtgaacgaattggtcaagggatcttcttgccgtttttaaaagcggatcaagatgtaaccagtcaatcacgctctggaggatttggttcctcagacctgtgattgttcgatatacgcatgcagtcagtcctagataacgaattggaggtttgcaatggctaagaaagcaaagagtcagtttgtctgccaaaattgcggatattcttcaccaaagtatttagggaagtgccctaattgtggtagttggaattcgatggtagaagaagtgattcaagaaacaacggatcggcgagtacggaccactcttacgggacaacggatgcaaccaacaaaaattgctgatgtcataccaaagaaagaaccacgagtacagaccaagctagcagagctaaaccgagttttgggtggtggtgttgttccgggatcattgattttgattggtggtgatccagggatcggcaagtcgactcttttactgcaagtctcacagcagcttgcagctattggcggcaaagtattgtatgtttcgggtgaggaaagtgcagagcagataaaaatgcgtgcccagcgtttaggagccattgatacggaattttatttatatccagaaacggatatgtctgagataagcaaggcaatcgaaaatctaacaccggattatgtcatcatagattcgatacaaacgatgacacaaccagatatcactagtgtggcaggaagcgtgagtcaggttcgagaaacgactgccgaacttctaaaactggctaaaaccaacgggattgctatttttattgtgggacatgtaaccaaagaaggttcaattgctggtccacgaatgctagagcacatggtggacaccgttttatattttgaaggtgaaaagcatcacagcttccgtattttgcgtgccgtcaaaaatcgatttggttcgacaaatgagattgggatttttgaaatggaagcaggcggattgaaagaagtagccaacccctctcaagtctttcttgaggagcgattagaaggcgctacgggttctgccatcgttgttgcaatggaaggcagtcgaccgattttagtagagatccaagctttggtgacaccaactatgtttggtaacgctaaacgaacgactaccggattggattttaatcgtgtttcattaatcatggcggtccttgaaaaacgggctgggttgcttctacagaatcaagatgcttatttaaaagcagctggtggtgtaaaattaaatgaacctgcaatcgatttagcaattgcagtcagcatagcctcaagttataaggaaaaaggtacgagtcctacggaatgttttatcggtgaaattgggttgactggtgagattcgacgtgtcaatgcgatcgaacaacgggtaaaagaagtgcaaaaattaggatttactaaagtatatttacctaaaaataatcttactgggtggcaaccgcccaaaggtatcgaagtagaaggcgtgtcaactttatcggaaaccctacgaaaagtttttcgttaattctgataaggtgttagttaaaaaaaaaaagaataaattcgaagatgagacgaaaataacgaaattatcagaacaagaatgaatgaagactgtttattgagaactatttgcatcagaaggtgctatctttgtccagctctttctaaaaaagattttttcgtttatgagtctcagcttcgtactaaattagtttggaggaacgtgtatgcagaaacgagtcattactgcgctaatggttcttgctggagcaagtttaggtatctcattaatgcctgttgcatggcaaaccattggtcaatcaaaaaatgaatggctgaacaataatatcactaatagcttgcttggagcccttattttctttttattatctttgctattagcgaaatatattgcagctggaattcgtaaaattgaagagaaattgagtgaattgagtctaacttatttattatttggagcaatcggatcaattattggtttaatgatcggggtcattgtatcgattcctttttataattgggatattccttttattaacggaatcgcgcctattttagtaatggcgttgttgggatatcttggctttcaaattggcacgactcgaatcgaagaatggaaaaaaatcttttcttctaaaagcaagaaaacagaacctgttgaagaacaacagatgcttgatcgtaaaatagctgatcattttcataagtataaaattctcgatacgagtgttatcatcgatggacgtatctacgacattgctaagacaggttttcttgaaggggtcctattaattcccaattttgttttatatgaattacaatatattgcagattcaggagacagcttgaaacgtgtacgaggtcgacgtggattagatattttgaatgctttgcaaaaagaagaaggtatcgctgttgaaatgtatgagggtgacttcgatgatatttctgaggtcgacagcaaattgatcaaattagcaaagatccttgatggtattgtggttacaaatgactataatttaaacaaagtttcagaatttcaaaatgttcctgtgttaaatatcaacgctcttgcgaatgcagttaaaccagtagtgattcctggagaaacaatgaatgtacttgttgtaaaagctggaacggaaagacaacaaggtgtcgcttatttggatgacggaacgatggttgttgttgaagatggacagcattacatgaatgaacatatccaagtagttgttacgagcgcactgcagacagctgcgggacgaatgatatttgctaaaccggctcattcaagtcgtggaatcgataatcaggatgacacaaaaaattagcaataatcaatggcaattggcggattttacgccggttgcctttactattttgcttaatgattgtacaattctagctgagcgaactattttattatcggagattttccctataagctagaaggtaaaaaccgaacagcaaaggattgtttgcaaatcagatgaaggaagaggaaaaagatgactaaagtgcgagtacgttatgctccaagtccaactggacatctacacatcggaaatgcccgaacagcattgtttaactatttatttgcacgtcataacgatggcgaatttattatccgtattgaggatacggatcaaaaaagaaacattgaagatggtgagaagagccagctagagaatctcgcttggttgggtattgattgggatgaatcccctgcaaaccctggagagtacggaccgtaccgccaatcagaacgcggtgagttgtaccaaccattgattgatcagttgctagcaagcaatcgtgcctataagtgttattgtacagaagaagagctagaagcagagcgtgaagaacaacgcgaacgtggcgaaatgcctcattatggcggaaaatgcgctaatctaacaccagaggagcaagcggaaaaagaagcacaaggtatccaaccagttattcgtttccgagttcctagaaatacagagtataagtttcatgatatggtaaaaggtgagatcgtttttgagtcagataatgtaggcggcgattttgtcattcaaaagcgcgatgggatgccaacatataactttgcagtggcagttgatgatcatcatatgaaaatcacacatgtattgcggggcgatgaccatattgctaatacaccaaaacaattgatgatctatgaagcatttggttggcaagcgccacaatttggacacatgacactgatcatcaacagcgaaactggtaaaaagctaagtaaacgcgatgaatcaattttacaatttattgagcagtatcgtgaattaggatacttaccagaagcaatgttcaattttatcgcattgttgggttggtccccagtaggagaagatgagttattttctcaatctgaattgatccaaatgtttgatccagaacgcttgagcaaatcaccagcggcttttgatgccaaaaaattggagtgggtcaacaaccactatatgcgtcaaatggacctggatcagttgacagaaatgtgtttgccatatttaatcaaagcaggtcgaattgaagaagagccttccgtagaaaaaagagaatggctgaaaaaaatcgtctcactatatcaaccacaaatgagttatgctgcacaaattgtggaagtttctgagttattctttaatgaacatcctgaattggatgctgctgcgcaagaagtcttggcgggtgaaactgttccaactgtactcaatgcctttaaagaaaaattgactgcaatgactacagttgacgcaccaacagtaaaagctgcaatcaaagagatccaaaaagaaacaggaatcaaaggcaaaaacttgtttatgccaattcgtgttgctgtctcaggacaaacgcacggaccagaattaccggatacagtagaattactaggaaaagaaaaagcacttgatcatttaaataatgtattataaacacgaagaatagacgaagtacttaccttttttttgaagagagatcacgggtggtgagagtgattaaaaaaagtaaggaaatgcacctaggagtggttttggcgcaagtcaaaaacggcagcagacgttacctgcaccaaggcagaaaattctgtgaacaaaagtggaaccacgtggttgagcgtcttttgaataaggaaacttatttgaaagatgcttttttgtatgtaagtaatcaataggggaagcaggtgagaagatgacttggacccaaaaagcaattgcagcagcgaaaaaaaatgacccttcagctcgatcaacgctggaaatcgtattgtcttatccgggctttcacgcattgttttggcatcgctggtcgcattttttatttcaaaaaaaactctttcttctagctagactcacatcccagttttggcgttttctgacaggcatcgagattcatcctggtgctcagattggcgaaggggtttttatcgatcacgggatgggtgttgtaattggagaaacagctattattgaagatgacgtcgtattatttcacggtgtaacactaggcgggacaggtaaagaaaaagggaaacgccacccgaccataaaaaaaggggcattcatttcagctcatgcacaaattcttggccctgtcacaataggggaaagcgccagaatcggtgctagtgcagtggttcttagtgatatcccaaatgaagcgactgctgtaggaataccagccaaagtcgtaagaatcaaaggaaagaaggttagccaagatgatcaaaatttataatacgttaacacgtaaaaaagaagttttccaacctctcgaacaaggtagggtgaaaatgtatgtttgcgggccaacagtttacaattatatccacgtcggcaacggacgtagtgtagtatcttttgacacgattcgcagatacttagaatatagagggtatgaagtcgattacgtaatgaacttcaccgatgttgacgacaaaattattcggaccgccaaagaattgaaaacttctgctccagaaatagcagatcgttttatcgaagcattcaataaagatactgcggctttaaatgttcaaccagctacattaaatccgcgagtaatggatcacatcgaagacattattgcgtttattcaagtattagtagataaaggatacgcctatatggcaaataatgatgtgtattaccgtacacgtaaattcaagcactatggtcagttaagtgatcaatcaattgatgaattagaagttggggccagtcaacgaacgggtgaagaacaaaagatcaaagaagatccgttagattttgctttgtggaaagcggctaaggaaaacgaaatcgcttgggattcaccatggggactaggacgtcccggttggcacatcgagtgctccgttatggcaaccaaacatttaggagaaacaatagatattcatggaggtggacaggacctgactttccctcatcatgaaaatgaaattgcacagagtgaagcgaaaacgggtaagacgtttgctaattattggatgcacaatggttatgtcacgattggtgaagaagaagaaaaaatgagtaaatctttgggcaatttcgttactgtccatgaaatggttcaaaaaattgatcctcaagttttgcgcttctttttggctactacccaatatcggcgtccaatcaaatacagtgaaacgacattgaaagaggcagaaacaaatctgcaaaaattgagaacagccttagaaaatgcacaatttcgtttgcaaaatagtaaagaaggattcccagaaggaaccgaccatgccatcttagcagaatttgaacagcgttttgtacaagaaatggatgacgattttaatgcagcaaatggtatcacagtagtatatgaacttgcaaaatggttgaacacttacagcgaaagtgcttcaatcgatatagaattattgactgctgcagttgaaaaattcaaggaatggctagccatctttgggatttactttgtgggtgaggaacttttagatgaagagatcgaacaactaatcgaagaacgtatccaagcaagacaagcaagagattttgcccgaagcgatgaaatccgggatgtgctaaaagaaaaagggattatcttggaagacacagcgcaaggtacccggtggagaagagacgcatgagagattacaaacagttgaacggactagcgttagcctatattggggacgcggtctatgaagtatacattcgggactatttgattgaacaaggacaaacaagacctaatcagcttcatcatatggcgacacactatgtatcagcaaaagctcaggcggcattgatccaaaagatgcttgatgaagaaataatgactgaagaagaatatgatttttaccgtcgtggacgaaatagtaaaagccataccagtgcaaaaaatgctgatgtaaccacctatcgcattgctacaggctttgaatccttaattgggtatctacacttaacaaagcaacaggatcgtttagacacgctcgtagcttggtgtatcaagaaagtaggggaagaagatgagggaaaagaaacaaagaaaaccgtcgcgtcaaaacacggtaaaaaataaacagcacactagaaagaattttcgtgaagaaacaactgaattgatagatgagaattttgtattcggttatcatgcggtaattgaagcgttgaaagaaggacgcgggaataaattatttatggcagaggatgccagaggggaaaaaatcgatgggttaaaagaagctgctcgcgcacagtctgtcccagtcaagtgggtgccaaaacaaaagctcgatcaaatgagcaatcaaggcgtccatcaaagtgtgattttagcgatcaccccttatgaatacctatcactggatgaattattggcacaaacaaaagagcagtcattctatttgattttagacaatttagaggatccacataattttggttcaatcctgagaacagcggatgctagtggggtagacggaatcattattccgaaacaccgtgcagtaggaatcactcctgtagtcgtgaagacttctactggtgctgtagaacatattccgattgctcgtgtcaccaatttaagccaagcgattcaacaactaaaacaagctggtttttggatttttggaacggatatgaaaggaactgattaccgtttgtggaatgctcaaggggcagcgggattgattatcggcaatgaaggtcgaggaatgagtgaaggattgaaaaaagatgttgatgagatgttgactattccgatgactggtcatgtacaaagtttgaatgctagtgtggcagctgggttattaatgtatcaagcttttactagtcgaaatggggcgccgcaatgaaaacgcccctgctaatcgtcgatggctataatatgattggtgcttggcctgaattagtcttattaaaaaaccaagatcgtttagaagatgcaagagaggcgttattgcatcgattatccaattattcaaaatacgaaggattaaagattattgttgtatttgatgcgcaattggttcccggtgttactcaaagctatagtaaatatcagttacaagtcatctttactgaagaaggtgaaactgctgacagctatatcgaacgcatcgctggagaattgaatgaccgtttgactcaagtaacagttgcaacgagtgacttagcagaacaatgggttgtgttttctcaaggtgcgttgcgaacttctgctcgagagctttataaaagtattgaaaaaacagaagaagcaatccatcagcatcaaacagacatcaaatttgaaaattttcgcagaaactctccttggacgcctgaacaattagctgaattagaaaaaaaactgcatgatttgagttagggacaaagttggttcgttaaatgagaaactaatgaacaagaatatgttacgctctttttgtaccaaaaattaagcataaaaggagcgtaacaaaatgaaatcaaacgaatcaatcagtaggagttcagaagaatttgaagcaatgtttttcaagtatcgccctatcgtcgagattatgtacaaaaaatattatctcaaagattatgatttagatgattggatgcaagaaggccgtattgtttttaacaaatgtctgcaggcttatgatgaaaaccgtggaacaacactaggagttttgttcaaacgctcgtttgaaaatcgcgtctgcagtttattacggttgcaacaagcacaaaaaagaaaagcacaattaaattcttcttctcttgaagaaaaaatttctcatgaaggaccaaattttctctccgatcaaaatgaacaaactgaaaaagcggagaagtatttaatgcttcaagaaactatgaataaatacgattcgccattttcgaagttagagcaaatcgttataatgaattacttgaaaggattagaacttgaacaaatcgcagaacaaacagaacttccactgcaacaaattaaaagcgcttacaaccgcggtaaaaagaaattgagagcgcttcttatgaacccttagagaaaatcttattgaaagaataattattttatggtaaacttgaaattttctgtaaattatagtatactgttgcttgaggtgaatgcgatgccaacaactttagcaacaatcaaaaaagatttagaaggtcgtataggcagtgaaatcatgctagttgctcaaactgggcgtaaacgtcaaacggaacgccgtggtgttttgacagaaacatacccttctgtgtttgtcgtggatttagatccaaacgaaaattcgttcgaacgtgtttcctatagttattcggatattcttactcgaacggttgagattgaatttttaacaaaagctgtttgatcagaaaagggctgacaaaatgttagctctttttttgtattttttattattgattagttaggagatagtagaatgattgttatgataaaagagttgcatgagatgaccggattagaatttcaccaaatcgctgctttacgtactcaagtgtttgtcgtagaacaaaattgtccctatcaagaagtagatgcaattgatttgattgctaaacatctttgtatttttgatgaacagcaacaacttgtttcttatgcaaggatatattttatcgaaggtacggttcattttggtcgagttttagtaaatcctctgttccgtggacaagggcatggggatcaattgctacaagaaatcatcaaacaactaaatcgtttctatccaaatgctccgattgaaatcgaagctcaagcgcatttgcagaaattttacgggaaatataattttgtcactgtttccgatccttttgatgaagatggaattttacatgtggttatgagaaaagagaaataaaagcagtcattacttataaaaaaaaagatgaacaaatcatgaataactctctgctctgacatgtatttgccagagcttttctgatttcaagagctatccattattgttcgaatcattctaaaaaactatctagttaaaaggatcacggtttatatcattagttgtgatattggtacgggattctgtttgtactttcaataagtcacgaatttcttgaagatagtcttcggcagtaacttctggttcttcttcttcaactggtttttgatgaagattgcgcaatttattcacagctttaacgattaagaatagaacaaaagcagtaatcaagaatgtaataattgcagtaatcacttgaccgaaattaaagacgacattttttttaggctcccaaacaagccctgaaaatgcatcttcgctgccgaaaaatgaaaataccagcgaaactaatggtgttaaaagaccttctaccaaactggtgacaatcgctgtgaaggcactcccgatgacaaccccaacagctaagtcaatcacatttccgcgcaaaataaattctttaaattccttgatcataaacaaacctcctttaaatttattcttagtataacgaataaacgatgatttataaaaatatacgcccgtaaaatgagtaatttttctggaaaaattctgcattatgctataattgaagagatgatttttgagaggataagaggtgcattatggcaattgaactaaaaaaaaatgttcgactcacggttttgccgactaaaaaatataaaacaatccgtgtttttattcgatttacttcgcaattagcggctgaaacggctgcgaaacgcacattattgacgagtttattagagacaactagtttgcgttatcccactcaaacagcctttagtacgcaactggcagaattgtatggagcaagctttggcatgaatgttaataaaaaaggggatcttcatcaagtcaatgcagcgatgtcgttcgtcaacggaaaatatgttgctgatgaagaactatttacccaagctgtttcttttttgaaagaagtgctttttttcccaaatattgttcaagatgaatttgaatcaaaaaattttacgatcgaaaaaagcaatttgattgcttatatgagaagtattgctgaggataaacaggcgtttgcttcattaagcttacaagaattatttttttcaaaaagtgacaatcaaaaatttccaagttttggtcgtcctgaagatttggaagatgtgacggcaaaagaactaacagaaacatatagttctatgattaaagaagatgctgtagatatttttgtgattggggatgtcgaagaagatcaagtaattgaagttatgaaggatctcccctttgaaaatcgtcctgaaaaagatctttctgttttttatcgtcaagatttggaaaatattatccgcgagaaaatcgtcagagagcctgtgactcaggcaaaactgaacttaggttatcgtacgggtgtttattataatcaaccggaacgtttctctctcatggtttttaatggattatttggcggatttcctcattcaaaactatttatgaatgttagagaaaaagagagcttagcttactatgcatcaagtaatgtggatacatttcgaggttatttatctgttcaaacaggaattgatggcagtaaccgggatcaagtctttactttgattgaacaacaacttcaaagtttacaaagaggagaaattacagaggctgaattggcacagacaaaagctatgcttaaaaatcagtttttgttatcgttggatagtccacagtctttgattgaaacagaatatcttaatcagtgggtaccgaatactaaaatgagtgaagagcaatttatacagcgtttggaagaggtatcggtcacagatgttcaaaaaattgctcaaaagatcgaacttcaagccgtattctttttagataaggagcttgatcatgaataaaaaacattataatcaaataaatgaagtcttgtataaagagatattacccaatggattaacagtttatttattacctaaagaagggtttcataaaacatacggtctttttagtacagattatggttctatcgataatcattttggttatgcgaatgaaacgatgcatactgtaccagatggtattgcccatttcttagagcataaactttttgaaaaagaagacggtgatgtctttcaaaaatttgggcaacatggagcatcagccaatgcatttactagcttcacaaaaacgagttatcttttttcggctaccaatcaaattcgaaaaaatttagaaacccttttagattttgtacagatgccttattttacgaaagaaacggttgagaaagagaaaaggatcattgggcaagaaattcagatgtatgatgatgatcctaactggcaacaattttttggtgtcattaagaatctatatccaaagcatccgcttcacattgatattgctgggactgttgaaagtatagcagccatcacagcagaagatctttatctgtgctaccatacattctaccacccaagcaatatgactttgttcatagttggaaacatcgatccagaagagacaatgaactggatcagagaaaaccaggcagcaaaaactttttctgcagcaaaagaaattaagcgtcaatttccggaagaaaccgttcaagaaattattccagaaagtattatgaggatgcccgttacgcgaccaaaaggtgttttgggtatcaaagggaatatggagaaacgtccgacggaaggtcgggagttgctacgatataaacaatctttgaatttattgttccaattacttttaggtaatacttcagctaattacttaaggttgtatgatcaaggaattattgatgatacgtttggtttcgaagtaagtttggatcgaagtttttactttgctgatttttctggagatgcagaataccctgaagagatgcttcaagcggttgaagaaattttattgaattatgaaaatgatcctgaaatgaacgagaagaatcttgagttacttaagaaaaaaatgctgggtaaatattttcaatctctcaattcattagaatttattgctaatcaatttacacaaagcttatttggcgaaacaacactctttgatttgccagatgttatacgttcaatcacgctcaatgatgttcgatctgctgctaaagtattcattgatcaaaaagcattcagtcggttttacttgctaccaactaaaactaactgattaatcgtcattgtgtaagatgccgtctatgcattttctgatagatggctcttgtttttgtagaagaatgagtaatgagatcaaaaagtattaaattttgtttgcgacttgtctgaatgttatcctcagtcaattttttttatggtattctttaaatgatactgattgaacaattttcatttatgatgaaaaatcaagagtaaaaatgttatatttaataaacaacctatcaattaagcaatccaaggatgacaaggagaaacgaagtggatttccgatccaagtgtttgccttccataaaatgaatagtaaagactggagtagatgatcgagtggccaacgaaactacgattggagcaaaattacggcaagcccgtttagataaacatatttcattagatgaattacagcaaatgacaaaagttcaaaaaaggtatttggaggcaatcgaagccgatcgttttgaacaattaccaggaactttttatgttcgtgcatttattcgtcaatatgccgccgctgtaggtgaggacggagataagttagtttctgtatttgatggaaaagatacattggcagaaccactgcctaaaagacctcaacctgagaccgtaagcggatcgagaaaagctttgcatgtagaggaaaaaggcggaacgtttttatcccgctacttaccaatgattttattaggattagtagcagtcactattatctgtattgttgggtatatggcttggcaagacagacattcaacccctatgattcaaggtagttcggcaccggtggttgagaattcagcctatacatcaacctcaagcacggtggaatcgacagcaagcaaagaaacgagcgagtcagagactcaatcttctagcagcacagaatctagtgagaaagaaatgactatgaccaaaggggaatcttcccaatcagatatcagcatttcaattaaagatgcgacgaatccaattaaattagagttaactggattagatgcctcgtgttgggtaggcattcttgtagacaatgcgtatgtctaccaatatactttacaagcgggcgaagtccaatcgacgacattgccagaaaatgcaaccaatgcaaccattgtacttggtgcaagtcaaaatatccagattgcggcaaacgggcaaaaaattgatttcgatgatcctcagtataaattgctccaaaaaaatgtgcatttagcgattgagtatcaagaaacaaactgatcagaagaacgattaattagttagaaagataacattgttcctatggcaagtgctgtagtagcatgatttccgtttttttcgtacaatatttgtcagagaggagcaaattttttgaatttacctaatcaattaactgtattacgcatcataatgattcctatatttattttagttttggcgttgccaatcgatttaggaacattggacgttggaggcgtcgatttactcacaacacatctgatagcagccattctatttgctgttgcaagcattacggattggctggatggtaagattgctcgttccagaggattggttaccaattttgggaaatttgccgatcccttagcggacaaaatgctggtaatgactgcatttattatgttagtcgaattggataaggctccagcttgggtagtctctatcatcatttgtcgagagttagcagtcaccggtttaaggctcttgttagtagagcatcatggtgaagttcttgctgctgcttggcctggtaaaatcaaaacagcaacacaaatggttgccattattttcttatttattaacaatcttcctttttcactcataggcattccattggatcaaatcatgttgtatgtatgtttgatctttacaatttattctggaatcgattatttcattaaaaatgccagtgtttttaaaggttcaatgtaatttctaaaagttcagaggaattctgaactttttttgtaaaaaaaatcaattacaacgtagttgataatgaaggagtaatgaaatgaaggcagagattattgcagtagggaccgaattgcttttgggacaggtggtgaataccaatgcaactttcttatcagaagaattagctagtttaggaatcgaagtttactatcatagtgttgtaggggacaatccaaagcgtttggaagagctagtaacacttgccgagaatcgcagtgacttgatcgtattttgcggtggtctcggacctacagaagatgatttaaccaaacaaatcgttgcacagcatgtcggtcaagagctcgttcgtgacgaagcagggtatgagcaaatgctgacctttttcaaaaatggtcagcgttttatgacagaaaataatttgaggcagacgttggtattcaaagatggtacagcgttacctaatgcaactggattagcaatcggtatcttctaccgaacagctacagcggcatatctcctgttgcctggaccaccaagtgaactgaaacctatgtttatccaacaagcccgtccaattttgcagacagagttttcatcagaagaacagttgatttctcgagtattgcgattttatggaattggagaatccgcactagtaactgaacttgccgatctaattgattctcagaagaacccaacggtcgcaccgtatgctaaacccaatgaagtaaccttgcgtttgacggtgaaaactacggatgaatcggcaggacaagccaaactagatgaattagaacaacaaatccaagcaagagtgggcgaatatttttatggatatggagagcatacttcattagctgaagtagtcgttgatatgttgaaagaaaagaaaaaaaccgtgacggctgcggagagtttgacagcgggactctttcaagcgacgctgggagacatctcaggcgtgtcccgtgtattttctggtggttatgtgacttatgctaaagagacaaaaagtaagatgctaggaatcaatgaagacttgctaacagcttatggaactgtcagcaaggaatgtgcagaagcgatggcgcttgctgcccaagccaaagaaaaagcggattacgccctttcttttaccggggtagctggaccagatgagcttgagaatcaacgcccaggaacggtctggattgctttagcaaccaatgaaggtgtgaaaagcaagtgctatcatttttccagagatcgtgcatacgttcgtcatagtgcagtaatggcaggattagatctattacgtaaggaattgttaagatgatgcgaatgtttgttcgttttttcttgcatttttttaaaagaaggactattattaacatagtaattgacacacgaaagtgaagaaaataagggggattatccgtttggcagatgatcgtaaagcagctttagatgctgcactgaaaaagattgaaaagaactatggtaagggtgccattatgaaacttggtgagaaagtcgatcaacaaatttcgacgattccaagtggttcattggctttggatgttgctttaggtgtgggtggttatccacgtggacgtattgttgaagtatatggaccagaaagttctggtaaaaccacagttgctttacacgcaatcgctgaagttcaaaaaggtggcggaacagcagcctttattgatgcagaacatgcattagatcctcaatatgcacaaaaattgggtgtaaatatcgatgatttgctgctatctcagcccgatacaggtgagcaaggtcttgagatcgctgatgctttagtatcaagtggagctgtcgatattgttgttatcgactcggttgccgctttggtaccaagagctgagatcgatggtgagatgggtgatacccacgttggtcttcaagcccggttgatgtctcaagcattgcgtaaattatctggatcaatcaataagaccaaaacaattgcgatttttatcaatcaaattcgtgaaaaagttgggatcatgttcggtaatcctgaaacaactcctggtggacgtgcgcttaaattctattcgacgattcgattagaggtacgacgtgcagaacaattaaaatccggaacagacattatcggaaaccggacaaaaatcaaagttgtcaaaaataaagtagcgccaccttttaaagttgctgaagtagacatgatgtatggacaaggaatctctcaagagggagagttgcttgatatggcagtagagcaagacattgttgataagagcggtgcttggtatgcttataaaggagatcgcattggtcaggggcgggaaaacgcgaaaaactatatgcgtgaacatcaagaaatgatgatggaagtttctgctcgtgttcgcgatgcgtacggcattggtaccggagaaacggtcattgaaacagaagatgcgcaagaagaactaccattagacgaataagatcgtttaacgataaagaagaagccaaacattcaagtgtttggctttttttgtacagtaataacagatctgctcataaaaactgcacgttaaaatgaaacctataggaggtgagggagcgtcaataattttgtgtaaatgattcttccctactgcagattgtttctaattctcaatcagttggcttagcatttgttcaagttcgccttcggcctgttgaaagcctttatgactgcgacctaggaatttttggttgtaagtatcaaaagacgagactaagaaacgttccatcgactcttcgttttggaactgttccttgcggtggctgtatttcttgatttgcttattaaaggattcaatcaagttcgtagaataaatactcttgcgtatggccaaggggaaatcatagaaagtgagcaagtgatcgttcgaaagaatcgattcaaccacttttggatagctggttttccatttttccgcaaaagcaccacgtgcttccaacgccacctctttagatgaggcttgatacaccattttaaaatcatcacagacttccttacgatcatcgacacgcactttgtgactgatattacgggaaacgtgtacacaacaatgttgaaaacgagctttgggatagaaccgactaatcgctcctaccatcccctttaagccatccgtgatgaacaggaggacatttttcaaaccgcgctcttgaaggtccaataaaatttcctcccaaatcgtgatggattcagtcggtgcaatcgcatagctcaatacttcctttgatccgtccgggcgaatgccaactgcgatatgaatagcttccttggcgacggttttccgctttaacggaatatacgttgcgtccatataaatagcagcataacggtcatgaagctcccgccctttaaacgccgttacctcttctgtaaatgattttgttatattggacatggtttggggcatgtagtgatgcccatacattttctcaatcaagtctgcgatttccgacatggtaataccttttcggaagaggtgaatgacggtctcctctaacgtgtcattcgtccgtctataagcaggaacagtctgttgcttgaactcaccattgcggtcgcgcggaatctggagatgaagttccccatactcggtcttgaccgtacggtcataggagccgttacgagaattacccgtgttaaaaccaatgcgatcatacttttcgtaatctaggaaagccgttaactccgttttgagaagcgtattgactgctttctccaaatggacacggaataattcattcaaatcgcctttgttcgctagagtctttagaatttctgtagtaaaatcgttcatagggaagtcctctcttctgtgaatgtgttgtggtaactctattctacagaagggacttccttttttctatttacacaaaatattttacactctcggaggtgatgtacataggatttaaagttgacactcttgtgtacaaacattagaataaacttatgtgggtttccacatagcagtaggcaacttgataatttattttaatttgtttatcaaaactacaaaatattgtaaaagatagtatggaggtggattcattggaactactttacattctcctcgctatcatcggtttaattgtcggtcttggattaggagtttttgtgaccaaatctcgtcacgaaaaagagatcaatggcgcgcaaaattctgcaactggaattatcgaaagcgctaaaaaagaagcagaaactctaaaaaaagaagcattgttagaagctaaggaagaaaatcagcgttatcggtcagagattgaaagtgagttgaaagaaagcaaacttgatttaaaatcacaagaaaatcgcttgctccaaagagaacaagtacttgatcgcaaagatgattctttggaaaaacgagagcactcactggaagaaaaagaaaacagacttagtgagaaacaacaattaattgacgagcgagaaaaagaagtagaaaaactaatcgatgggcaacagcaagaattagagcgtattgcggctttgtctagagaggaagccaaagagttgatcatgaaatcaacggaagaagaattgaatcatgaattaacgattatggtaaaagaatcagagcaacgtgcaaaagaagaagcagatcgtaaagcgaaaaacttattgtcattagcaattcaacgttgtgctgcagatcaagtatcagaaacaacagtatctgtcgtatcattaccaaatgacgagatgaaaggtcgaatcattggacgagaaggacgcaatattcggacattggaaacattgaccggtattgatctgattatcgatgacacaccagaagcagttgtactatcaggattcgatccaatccgtcgagagattgcacgaatgacattagagaaactgatccaagatggacggatccatcctgcacgtattgaagagatggttgagaaatcccgcaaagaaatggatgaacacatccgtgaatatggggaacaagcagcctttgaagtcggtgcacataccctacatcctgatttgatcaagatattgggacgtttacgctttagaaccagttatggacaaaacgtattgaatcactcaattgaagtggcaaaactttcgggtgttctagctgctgaattaggtgaggacattcagttagcaaaacgtgctggactgctgcatgatattgggaaagcacttgatcatgaaattgaaggctcacatgttgagattggtgctgaacttgctgccaaatataaagaaaatcctgtagtcattaacgcaattgcatcccaccatggagacgtagaagctacttcagttatctctgtgctggtagctgcagcagatgctttatccgctgctagaccaggtgcacgtagcgaatcgttggaaaactatatccgtcgtttacaaaacttagaaaatattgcgaatggcttcaaaggtgtagattcaagttttgctgtacaagcaggacgagaagtacgagttatggttaagccagaagagatctccgatttagatgcggttcgtctagtacgtgatatccgcaaaaaaattgaagatgatcttgattatccaggacatatcaaagtaacggttattcgtgaaacgcgagcaactgattacgctaaatagcataaaaaagaaccttggcttttaaagccaaggttcttttttatcaaatagtttagccctcgttagcaggattaaaattaatcaaagccgcctagtacttaagagaggttagatttttcttctgcgcgcaaagtctacaaatcgaaatttatctaagcgatgtatcgattcagtgtattcaaaacagcgtgtgtcttcaagataaaccaaactacgtacagtaacaacatgttgatcatcaggatgaaggtccattaaatctcttaattctttattgactggatccacggtaatttctttttgtgcataggcaatttcaagtccaagatcattttcaaagtaatcatagatcgagtcttgtgctcgacgttcaggcaattcttcaataatcgaagcatctaaataatctttatctagaatgacaacttcaccatcaatctttctttgacgtaccaatttccaagcttcagaagcaactggccaatcagtaataccatgtaattttggtgaaacggcgatcttacgaatttcaactacttttgtttcactaggaatacgttgagtatcttgtaattctttaaaactagttagaccagaaataggaaagtcaaaacgattcagatctaaaacgattgaaccttttccttgttttttttgaatgtagccagcattttttaaaagattcaaggcttttcgaaccgtttcacgagaaacactgtacattttgattaattggttctcactaggtaaaagagagtgtggcgggtattcgtttgacagtatcttttgttcaagatccaaaaatatctctttgaatttattcatgggattgcctcctcttgcctattatagcgagggcatttttgaaaagcaatcggctatttggccaataattcatcaattgaaagatccgtcagtttttcgacgattgtgtcagctccatgcagttcttcaccagaatagacaccaactgcatacatgccagctgccttaatgccatcaatacctgcttgggcatcttcaaaaccaactgcatcactaggtttaatgttcagcccttttgcagcttggataaagatttctggatctggtttacctttagaaagtgtggctgggtcaacgattacatcaaaatcctgcatgacacccaatttatctaaaataaatggcgcatttttagatgccgatgcgatagcacaaggaatccccttgtgttttgcttcttctagaaaagttttgacacccggaagaaggtcatccggagtcagactttgaagtaattgaacatagtgagtgttttttttgcttgctaaagcatctttttcttctgaactataagcatcatttttatttcctaatgttaaaatacgctctaaggaatccatacgactaatcccttttagttgttcgttgaattttaagtcgatttcaataccgatttcagcggctagttctttccatgcgatatagtgatatttggctgtgtctgtaatcacaccatctaaatcaaaaacaaacccttttttcattatgttactctcctttaatagttgatagattgttctttattggcttttaattcatgagtagcaccagaaagaatgatcgttgtattttggtcagctacaactgtcaatgtttcatgtgtaacattaaagtgataattaatacctctgacttgaatattaaattgaatattttgccattgcttaggcagatttggatcaatacgcatcacatcttcccgaaaatcgattcccgcaaatgtcgttagcggaatatagagagttgccgccattacacccgcatgaattccttcggcagtggttcctccttgaatatcgcggtaatctgaatagagagcctcttgatataaagaccaagcgagatcttgctggtcaaccattgctgccaattgagcatgtacaactcgagagagtgtagagccatgagaagttcttgccaaataataatgcaagtttttttctacataatcttcgggtaagcggtaagtaagatcatctaaaatttgatgcacttgcgctgttgaaaaattgtaaaaaatcattaggctgtcagcttgtttggcaactttgtatgcatcggcgctttttccttcagcatttaaaatacgatccatacgataaatgttcccatatttttctctataatgatcccagtctaagtcttttaaatcaaaatagccttcaaattgtgcaataattccttcgggattaatttctaaacataaatttttacgaatatcggtcatttgtgagaaattgtcctctgaaagctgcactttagctgctacactttgaaagatttctggtgaaagttggttgcgtaatttttccacttcttcaaacaaccacactaccatcatattagtatatgcattatttttcaacccacctttttgactgttgggatagctttcatgaaattcatccggtcccatgacacctccgattgagtaacggcctgtgagagaatccaaagtagcagcactctgccaaaaatgagcaatttctaaaattaattctaaaccgtattgctccataaaagatcggtcacgaacgttatgccagtactgccatacattataggcaatcgctaaagaaacgtgacgttgcaatcggctatggtcttctttccactcaccactgataggattcaaatgaagttcttgtgactgttctgttccatctaaaccagattgccatggaaacattgctccttggtatccggcttctttggctgctttcttggctgccgttaagcgctgatagcggtaaagtaagatctctctggcggttttaggaaaatgaagaatataaaaaggtaagatgaataattcatcccaaaaaatatgaccacggtaagcctcaccatggagaccacgggctgtgatactagcatcaagagattgctcataggcgttgggtgctgctgacactaatagatggtatgtgtgaagattcagcattttttgtgacatgagatccccatcaatggtaatggctgcattctcccatagtttgcgccaagcttctttggattcagcatacatttctttaaaccgtggtagtgaaagaagtgccagcttgctagtagttgtttgttctcccatttgatatttagcaacagtaactgatttttctaaagtataagttctatttttctccacagaaattgttaatttttgaattactttttctgccgttttttctgattttaatgtttcaagagaaaagtcatcagaaaataattgtgatgcttggcaaaccgtaatgtcagactgatttgtacgggcaatgagtagagctttgctcttaaaatactccgttgtttgaatggtcaagtgcttgtttgtcaagcttcgatagcgtgcgacattataattgtagaccgaaccatctgcttcacttatcacgtcgatttctccggtaaaattaagtggagtaaagcggtaaaggatggagtagtgatgactatttcccatattagcaattttttgtgtttcaattcttaattgcttttttgtttgtgtttcgatttcagcgaaggaggtaaataatccagtttttaaatttaattgacgcttaaaagataaaagtgtattttgtgcgatatcgattttttcgttatcaatgactaaataaattttttgcagatttggtgcattgacgaagtcctcatttgtaatggtacgatcagacacctctgactccgccgtattatagagacttgctaaataaagcccaggataattggcatcggaaatctccatttctggtgtagtaccacgcaaccctataaagccatttcctactgttaatagtgattcaacggagtactcatctttgccaggagtatagccataatattctaattgccaaggaatctccaaacgcttctcttcaaagctttcttcagttccacatacaaacgctcgatttaatttttcggttaaccattgatctaatgaaaaggttccttcttcgttagtaaagacgaatgagtcggaaaggattcctccctcttgattcttttccaattgtttctttaatgctgctattcgttcattggtggtccctgtaaacgtgaatatagcacccatgtggtcggccaatagccattgatcattagtgatctcaattttgttcacagtattctctcctttctacttgtctatacatgcaaaatgattataaccgatattgtaagctttttcaatttaataaggctgtttttttaaattattgtgtaaagttaaatgaaagtgatttgttttttttatttgctcaaagtttatttttttgaatgaaaatccttttgtaccaacaaaaataaagcatgttctgaatgattatttttcacaaatgtctttagtgaaaaaaatatagaatgaaacgcttgcaatattgtaaatataaagttatgattagcatgaaataaaaacatatatatacaagtttaaatggaaggggtttattattatggggaagtatcgggatgatgctgagaaattgctggagtatgtaggcggtaaagaaaatattgcagctgtgactcactgtgcgacgcggatgcgatttgtactgaatgatcagtcgaaagcaaacgagaaagccattgaagatattccaagtgttaaagggatgtttacaaatgctgggcagtttcaagtgattatcggaaatgatgttccaacgttttacaatgattttacagcggtatctgggattgaaggagtttctaaagaacaaagtaaagcgattgcaaaaaagaatcaaaatccgtttcaacgggctattgcagttttggcagagatttttacaccaattataccagctattattgttggaggacttattctggggttccgtaatgttttggaaggaattgattttggtagtggaacaattgtttcccaatctgtattttggagtggagttaatgatttcttatggctacctggggaagcaattttccattttcttccagtaggtatcacatggagtattactcgtaagatgggaacaactcaaattcttggtattattttagggattacattagtctctccacagttgttaaatgcttattctgttgctagtacagcagctgctgatattccattttgggattttggatttgcacaaattgataaaattggttaccaagcacaagttataccagcgatgttggctggttttatgttagcatatttagaaatcttttttaggaagcatataccagaagcgatttcaatgatttttgttccgttattctctttattaccaacaattttagctgcacatgttgttttaggaccgattggctggtggttaggagacattatttctaacgttgttaatacaggcttgacttcttccgtcagctggttgtttagtctgatttttggagccctgtatgcaccattagttattactggacttcatcatatgacaaatgcaatcgatatgcagttgatttcatcatttggtacgacaaatttatggccgatgattgcgctatctaatattgcacaaggttctgctgtattagcgattgtatttttacatcgagggaatgaaaaagaagaacaggtttcaattccagcaacaatctcttgttacttgggagtgacagaacctgcaatgtttgggatcaacttaaaatatgtttatccatttgtagctgcaatgattggttcaggtattgcaagtatgtttaataatttaatgggtgtgcgagcaaatgcaataggagtcggtggattacctggtattttagccatcaacgcaacagaaggcggaggtttgttagcttttgggatggcaatgctgattgcaatagttgtaccgtttattttaaccatagtttttcgccgtcaaggaatctttaataaaattgattcagtcaatagtgttgaagacaatgcgtatgcagaaggactggcaacagcaggtgcaagtgctggtgtagcaaacactccatctcaaactatttcaaaagagactactgtaactgaggaaatgctttatgcaccggcagatggtcaaatcattgcaatcggtgaagtggaagaccctgttttttcacaaaaaatgatgggtgatggctatgcagttcgtccaagtaacggaaaaatctatgctcctgttgcagggacggtttcaagtatttttgaaacaaaacatgcaattggaattttgactcctggtggggcagaggtcttagttcatatgggattagataccgttgaattaaaaggcgcaccattcactgtcaaagtgtcggaaggtgatgctgtcacagtagatacattgattgctgagatggatctagaagctgttaccaaagctggaaagaaaacagatgttgttacggttcttacgaacgctgaaaagatcaatcagctgacaatcaacaaaaccggcagtgtacacgcgcatgatcgagtaggggctgctgaagtccgctaaataaaaaagagtaggctcatgaaaggaagctatcattccattcatgagccgtatttttttgttttatttttcttaaagggttattttgtttggcgtacacgttctttataaaagtagcgcaaagttagaaatacgactagcaatactagcacccataggaagaataaagcgatttgtgaccctaaaattgttccggaaatataatcgggacttactttttgagcaaggtcgatcattgtcgcaactaaagctgttgcgacagcgccagaaaattgttgcagtgtgttgaagatggcatttccatcggcggccaaatgttggtcaattttacttaaccccatagtcatcatattgctatacgaacaaccgattccgatcatataaaagacatgggcagcaataaacgcccacaaaaacgtcaggtgcaatagcaaggccaacgctaaccagccaaaagtaatcaatacaagaccaatcataatcggttttttaggtccgatgctatccaacatacggcctgaaagaggagctagaacagcacctacaatcgcaccaggcaacataaccaatccagcagtgaatgcgtcctgaccaaggactatttgaacaaagtttggcaagacaaatgagattccaagtaaaagaaactgacagacaagaaatccgaataagaataatcggaaagaacgatttttgaatacagataagcgaatcaaaggctcagattgcaaggaacgtttatagaaaagagctgcacctaaaataccaagtgctaatggaaatatgctcgtaagagaaccaatttggtttaagaaaagcaaaaagccactaaacataaaagtgatacccaaaacactccacaaatccagacgaccagttttttcaattgcaattttaggtattgaataaagacctaaaaccaatgagaccaataagacgggtattaagaagaggaaaatgtagttccaattcaagagagaagtcaataaacctccgtaagtaggaccaatcgccggtgcaattgaagtagttaaatttccgattccaatcatagttcctcttttttccaaaggagagtacgtaaggatgatatgaaacatcaacggtaaagcaattcctgtacttgccccttgaagtaaacgaccaagtaataggatatcaaaggaagggaagaggaaatcaatcagtaatcctgctaaaaacaacccgttagcagccaaaaataatgttcgaatttgaaattgtttcaacagaaaagtagaaattggtacgatgatcgatatcaccagcaaatagattgttgtaacccattgcacatttgaagtagaaagattgaattgattaatcaaagtcggaaatgttacattcatagctgtttcgatcaataccccagcaaatgacataataccggttgctataatagcgcctaacaattttatttttttctccatattatcacctctaaaaaaattcataaaaaaagagccagtttctaaataaatagaaaccgcctctctctcgacaagcattactgcttgttatctgtacgatttaatctaaaagctattgtactgacttctttttgaagagtcaatagaaatgtttgaaaaataaaactgaattttatttgaaacttttcaaaaaaatccttacaccaaaatttttattttgttagaataatcaagtatgtaaaaaagaaaggaagttttaaatgccgattaacaaaaaagaaagtttgatctatacgacatttatgtgttttttatggtgtacttcatgagtgtctacaatttaatgtatgaggtgggaattactgcaatagcttttcaattggcttggaatgaactgccatttgctatatgtattgcgtttattttagattggtttattgtctcaggtcctgcgaaagcatttgctttccgttttattgaaaaagataccccagcttggaaaaagattggtctaatctcatcaatgatgattgctggcatggttttctttatgtcactttttggtgctgtaatgcatccgaatgtaaatcaaggactattaatgacatggttatctaatattggtaagaatgtagttgttgctttaccgttacaattattgattgccggaccaattgtacgacgattatttagaaaattatttcccataggtacggtacaagaaattcaatagaatttatacaaagggccacttctgaggttgaactcagaagtggctttttatctaaatatatttgttaaataacaaacaaaaaacaccataggatggtatggcgtttcttgtttaccctataaaataggatacaggatgtacttacataatagtatgcataggaagaaaagtatagttcaacaatttcattgctcggtgaaatcattgctttgaacatattttaatctgtaaaaaaattgaaaagttggtaccaaggacggtcagatacgatgtatgcttcaggagaaaaccctgatgatcataccctaaaaaacaaatgaatagccctagaaaaatgaatgccccgcctatcattagcagcaaacgtttatttattttgatcatcttaccacctgcttttgaaagtttttgtataacgctttaggcaaatgaataaactgttgcgtccaacctaagatgggtttactaagcatataagtaaaaatcatacatactaaccctattccgaacatcgtgacgcctagacctagctgggtgatagaaaagtgaagaccttgagatagtagtaaagggcttaaaacaacacttgcaatgccgccaatcagtgaagttatgccaataacacttgtactgaatggaaggcaccaaataactatcaaaccactaagcatcaacaatagaacggttaacagtaagcttccccacagaggaaatcctagaaaaattatcactaataagaatggatgaaaacgccgaggaacttttacgacaatttcttcggcacctaatgcactttgagcaatactttgaggagtccctaatctggctacagcttcaacttcagagagtccctcttccatcaaatcttggatcatttcatcataataatcaataagatgatgaatctcacttggtttggtcttataggctaattcagctgctaaacttttaataaatgttatgcgatccatgtcagttgtctcctttaatataatgatgaattttttctaaatgaggccaatcaatagtcaaaaattcatggatactattttgaccatgagcagtgatttgataatattttctcagccggccattatgttcttttgaataagtcgaaacttttttatttgcctctaagcgtttcaagatagggtataaagttgattcagagattggcaatagaggagcaatatttttaacgatttcatatccataagagtctcctctttgtaaaaaagctaacacacagaattcgataatcccttttttcagttgactatccaatgactacaccaccttatacataatactatataaaacatagtatagttttgcaagtcgatttgtggaaatcagtctcaagacgtagtaacttccaggttgcgcctattttttttgcttccagtcatttttccttacttaaaattcatcgtacggtgaaaatattgattattttatattagattcttttggtaaagtattactaataaaaagttgttaggattttagacaaacgtatagttgttgtgttaggtaattgctgttggaaaagttgcttgataaaagacacacgatactcagtccagctacgaaagaagttagtaagagagtgtgtgtttatcaggaaaggagttaataatgagaaaacaaacaatcacaaagaaatatttaatcaataggttacgcagtcatttagaagaatatttgtatactcccatcactgttagaaaaattgcgaaatatgcaaagatttctacacaaccgatctatttgcaattttcgaatatgcaaaattataaacaggcaatgattgatgatgttttggcagagattcacgagctttctttgaaaaaggagatagaggatgatccattgtatacgttttggcttaactattatttgtttgccagccaaaataggaacttattttttgcgttatttttgaatgatatagggtgtggttcctatttaagagatcaatcattgtcattgtttatagagacaatggctgaatccgaagtatatcaaaaagcaaattgcgaagacattgaaaaattgcataatgaaagtttgattttcttttctggtctcgttcttacttatgtacggggagagaatatgcaagcaatagaagaatttttacaagatattaaagactatttttatcgtacactgattgatcctatgtatatttatcgagaaatattaccacaatcagtcatcgaagctggtttttaaaataacgataaactgttttttaatttttttcattacttgataggcttcttgctttataaaaattcttggctcattcattttcttgtaaacgaatagtatgggtttattgttggcaattttcaagaaatatgagaaggtagaattagcaaaaagtaaggtgttttatgactaaaaagaaacaagtgatggaggaatcttgatgggtcaaacagataattattcagataaaaaagctcaaatcgatcagcgaatctgttttttggaagagcatacttaccaaggaaacgaccttggcgtaacctttcaagagcatgcgataacctttaaatgctggacgccagaggctgatgcagtttcagtcattatttatcaaagcggagaggttaaagacaaggatcgtgtgatgacagttccaatgaagcaagaaaataattgttggaaggtcacagttacggatgaagtcaaagaaatgttctatacgtttgaaatccagcgaggacaagagaaggttgaagtggttgatctttatgcgaaagctgtcggtctcaatggggatcgtggggctatcgttgatttaaaagaaacggatcctgagggatggtcgcagacagaatgtgttggccaagatacgattacagacgcttacatttgggaattacatgtggaagatttcagtagttctaaaactagcggcatctcagaaaaaaatcgtggaaaatatctagcgtttactgaaaagaatacgcatcttgaaggagatgaaaggcagccaacagggctcgcctatttgaaagagcaggggattaactatgttcatctgttgccaatctttgattttgataatgacgagctgtctacagcctacaactggggatatgatcctaagaattataacgttccggaaggaaagtattcttcagacccgaaggatcccaaagcccgcattcgggaatgcaaacaaatgattcagtctctccatgaggaatctattggtgtagtaatggacgtcgtttttaatcatactgcagtcacagaatcttcttggtttaataagactgtgccaaactattactaccgtcaggatgaagaaggaaatttcgctgatggctctgcctgtggcaacgaaattgcctcagaacgtaaaatgatgcgcaagtttattattgattcaatcctttattgggctaaggagtacaaaattgatggatttcgttttgatttgatgggactgatcgatgtggagacgatgaatcaactgcgtgcaagcctggattcggaaggtttctctcatgttattctatacggagaaccatgggatgccggcagcaatcgtatcatccagccaaacatcccagcgaataaaagtaatgtctgggcactgtcagaaggcgttgcggtttttagcaatgatttaagagacagtatcaaaggtgatgtctttgaagaaacagacggagcttttattcaaggaatgaatggtcaaccgcaagtcaagcaaaccttttatgcggcaaatttggcaacggcgattcaaggaaatacgaaagttgctgaacaagaaggcgccgagcgctgggcaaaatctccccgccaagtgatcgcctatgcttcagtccatgataatttgaccttatgggacaaactggtggcaaccatgcaggcttcagcgaaggaaagaaattatgattttgatcctgagcttttagcccgcaacaaactagcagcagccattttgtttactagccaaggagcagtattgacccaagcaggcgaagagtttggccgtaccaaacaaggagacgaaaattctttccgttcaccgatagaaattaatcagctagactggaaacgcgcacaaacttttaatgagttgcggtcattttatcaaggtatgtggcagatccgtaaattctatcctccattgagagatgccacgattcgaacagctgaaagtattcagtttattgagagtaacaatgaaaatttccttgcatatattattccgaataatggttacaatgatacatggcaatcattagctgttttggtgaacagcagcaataaagacattttggtaaatagggaagaattcaagcaagagaaatggtggatcgttgcagataattttggagcaggtatagagccacgtggagagatcgtgaaggaaatcaacatcgctgccaaaagtcttttacttttagctaaatagttattttatttttaaaatttttaaattaagaagaaagttaaattgtattaaaatccatatttaatggattttaatacaaccattacgaatgtttataaagtgataggaataattttctgttatgagagaagtacaggtggaccataacatgaacagtttaaaagaaaccgattttatgatgacaatctgactgcttaatgctatagtaaaaacagaaaaacccaagttggattgttactgactcgatcaggcaaaacctaaatgagaaaacgctctttgtagcggctcttatttaggttttttatttttttcgggtatttcttagaatgttaagcagcaaagttattgtttcagttacttgcaaacatatgactttgttaaaataaattaggcaaaggagaacgagcaaatggcaaaatttccagaaaatttcttatggggcggcgcgaccgcagcgaatcaattagaaggggcgttcgatcgcgatggcaaaggcttgtcagtggcggatgcaatgcctggtggcaaacagcgtttagcgattttaggcagtgatacgtttgattggacgatcgatgaggacaaatacacctatccaaatcatcgcgggatcgaccattatgaccgtttcaaagaagacattgcgttgtttgcggaaatgggcttcaagagctatcgtttttcaatcgcttggacacgtatttttccaaaaggtgatgaaacgacaccgaacgaagctgggttagcattttacgatgcgttgattgatgaatgtttgaaatacgggatcgagccagtggttacgatctcccactatgaaatgcccttgcatttagccaaagaatacggtggctggaaaaatcgagcattgatcgatttctatgagcgttttgcaaaagtcgttttggaacgtttccatagtaaagtcagatactggatgactttcaatgaaatcaattcagctttccatttctccgcattgagccaaggaatggtcaacagtacgggtgctagcgactttacaaacgtgatccaagcgtggcacaaccaatttgttgccagcagtaaagcagtaaaaattgggcatgaattgaatcctgagttacaaattggttgcatgatcatttatgcaacgacctatagcattgatgcaaacccagtcaaccaagtagcaacaatgacccataaccaagccttcaactactactgtgccgacgtgcaagtacgtgggaaatatccagcatttactgatcgcttgtataaagagcatggggtcaagaaggaagatcttgatattaccgaagaagatttagtattgattgctaagtataccgtcgattatattggatttagctattacatgtcttctgcagtggatatcacaacagaagaagctgatgaagtacaaggtaacttgttgggtggtgtccgcaatccattcttggaagcaagtgaatggggctggcaaatcgatccagaaggactgcgcattgcgttgaatgaattgtatgatcggtaccagaaaccattatttatcgtggaaaatggtttaggagctatcgatactattagtgaagatggcaaaatcgaagacgattaccgcattgattacttacgtcgtcatatcgaagcaatgggtgaagcgattgaagatggtgttgacctgatgggatatacaccatggggatgtattgacctcgttagcgcgtcaaccggagaaatgagcaaacgctatggctttatctacgtggactttgatgatgaaggcaatggcacaatggatcgatcaaagaaaaaatccttcgattggtataaacaagtgattgcttcaaatggagaagatttagcgtaagattaatactcgtttttttatagccgcacaacacggattatcgttgtgcggttattttgctgaaaaaatagattgtctgaatagagtaaaaaatctaaaaataatagataacacatcataaaaattttaatcagaaaaactttaataattgcacttggtaagcggaataaaactaaattttctaagaatggctgactctttctttccaactaaaaggggaccaacatatttttgatgatatggaaaattttgcaaatttagaagggcgttgtggttttcttctgaaatgtttcacgtgaagcatttttacagaagatagttacatcaaatgcaatattttcgaaaatagcgactctattttgtgaagcggatgagtttctcttagaacgtttggattaataaaaattatttcgagccgattaaagaagtaagagaacggagtaggaaaaattgtttcccctcatctattcgaataattggtctttaccatatgatggtgataagattaaaacatagaaatgtagagcattttgtttgtgaaaacgtttcaattttaaagaatggagagtaagcgattaaaaaataaaaatagtaggcaagttacttcttttttacttaagagaggagtatattcgtatttggaatttttctttatttagaatgattttaatgtatttttttagaaatagggggatgtaaaatggatattgtaacattagcacgaatccagttcgcgatgacgacgatttttcactttttctttgtaccgttttcgatcggaactggtgtcgttgttgcaatcatggagacactttatgtgatcaaaaaagatgaaaaatatcgccgaatgacaaagttctggggaaatatttttctattaagttttgtggtaggagtggtaactgggatcattcaagaatttcaatttggaatgaactggtctgattattctcgttttgttggggatatttttggtgctcctttggcgttagaagcattgctagccttctttttggaatcaactttcttagggttgtggattttcacatgggataaagtcagccctaaactgcatatgacgttcttttggttagttactattggctcgatgctctctgctttctggattttagctgccaatagttttatgcaacatccagttggatacacattgaacaatggtcgtgctgagatgactgacttcggagccctgttagctaacccacaagtctggtatgagttccttcatgttattactgcagcaattgccatgggaggaattctgattgcaggaatgtcagctttccaattgttgaaaaaagacaagaaagttgaccgtgattttttcaaaaaatcaatgcggatcggttttgcagtagctttgtttggttcaattacggtgttgatcgcaggtgacgaacaaatgaagtatttggttgaagaacaaccaatgaaatttgcagcaatggaaggtacgtatgaagataccggagatcctgcggcatggactgtagttgcatgggcaaatgaacgagaacacaaacgggtttttggtgttgagattccttatatgttgagtatccttgcatttaacgaaccatctggttcgattgacggaatgaacacagtgaatcaagatttgatcgaacgttacggagatcggaactattttcctccggtcaacacattgttttggagcttccggatcatggcaggtttcggtgcattgatgttgttggtttcttcattggggttattctttacgcgtaagaagaagccttcgctatttgagaaacgttggatgctttgggtagtggctataacattatttaccccattcattgcaaatacagcagggtggctgattacggaattgggtcgctatccatggacagtctatggtttatttacgattgaagatagtgtttcgccaaatgtatcggcaacttcgcttgttatctcaaatattgtttactttgttcttttctctggtttggcattaacaatggtttatttgattcggcgagagttaggacatggtcctgaaaacaaccagatggaaggaacgctgcacgaagcagaagaagatccatttgataaggaggcgtttgaaggatgaccggattgcaactaatgtggtatgtattgattggcattttgtttgccggcttcttctttttagaaggatttgactttggtgtggggatgtctgtccagacattgacccataatgaacaggaaaaagatcagatcgtgcatacgatcggaccagtgtgggacgggaatgaagtttggttgattaccgcaggtggcgcgatgtttgcttctttcccttactggtatgcctctttgttcagtggttattatttgattttgttattgatactagtcggattgattatacgcggtgtctcctttgagtttcgggcaaaaatgcctgaagaccgtaaaaatatgtggaattggacattaaccattggcagtacattggtgccttttatgttcggactcttgtttacaagtatggtccaaggcatgccaattgatgcagagggaaatatgtctgcgcacttcggtgactacgtcaatctcttctctgtagttggcgggattgccttaactttgctttgctacttacatggattgaattatattgcactaaaaactactggtccgatccgtgaccgtgcccgaaattatgcgagtgccttttatggtgtgctatattttggtttggtggcgtttgccgcgctactttatttcaaaacagatttctttgaaaaacattttgcttcgacgcttcttttgctgattgtgattgtggctttgacgctgatagcgaatatctctgtatttaaagggaaagaaatggtggcatttattgctagtggtttgaccatggtggcgctagtcggattgttgttctctggtttgttcccacgagtattgatcagctcaatcgaccctagttatgatttgttgattgcagaagcttcctctagtcactacacattgaagatcatgagttatttatcactgacaatcttgccgtttgttttggcttatacagcatggacctactatattttccgtaaacgaattagtcatactgagctgacggagggttattaatgatcgacaaacaaatcatagagcttcccggaatgaaacggttaatgggattgcttgcaggactttctttcctgcaagctctcttcatcattggacaagcctatggtcttgctagtgggatcactggattatgggaaggacaatcgttagaagagcagtggggctggattctactgttcttttgttcgtttttaggtcgccaggccattgtttattttcggacaaagaaattagacagctatagttaccagcaagctactgaattacgtaatcaactgctagaaaagatttttcgtgtaggaccacaaatcgttcagcaacaaggtaccggaaacattacaacgatggtattggaaggcattagtcaggtagaaaactatttacaacttattttggcaaaaattatgaacatgtcgatcattccttgggtgattttggctttagtattttacttggattggatctcaggtctggttttattgctggtttttccactgatcattatttttatgatcatcctaggctatgccgcccaaagtaaagctgaaaaacaataccgcacatttcaattattgtccaaccactttattgattcattacgtggaatcgacaccttgaaactttttgggatcagcaaaaaatatggaaaaagtatcttcgcttctagcgaacgttttcgtaaagcaacgatggggtcgttgagagtcggaattctttccacttttgcattggattttttcacaacattgtccatcgctgtggttgcggttttactggggctgcgtttgatcaatgaagaaatcttgttatttccagcactaacgattttgattttatctccggagtattttttaccaattcgcgatttttcaagtgattaccatgcgactttagatgggaaaaatgcaatgaccgctgtatctacgattttatctgagccagaagcagccattgatccagtaagtttacctcaatggcaagctgattcgcaactatcgattcattcgttatcttttgattatggagaaaagtctgttttgaaagatattgcattggaggtccaaggatttcaaaaaattgggatcattgggatgagtggctctggaaaatcaacgctgatcaataacttaagcggctttttgattccgaaagaaggcgaaattacttttgatggccaaaaaatgactgcattaagacagtcggattggcagcagcaactagtttatattccccaaaacccctatatctatcggatgactttgcgagaaaatgtggctttctatcagccaaatgctactgaagaacaagtgtggcaagcaatcgaagttgcaggtttaacgaaattagttcaagaattgccgcaaggaatcgatacaatgctaggtgaaggagaacgccatctaagcggtggacaggcgcaacgaattgcgttggctcgtgctttcttagaccagcatcgaaaagttttattatttgatgagccaactgcccatttagatattgaaacagaagtagaattgaaagaacggatgcttccgttgatggagaaccatctagtcttctttgcgacacatcgcttgcattggatggaagagatggatcaaatcctagtaatggatcaaggcagaattgttgagcgggggacattggcagaactgcaagcaaagaatggcgctttcgttgcgttagtcaatgggatgaggagggaacaacttgaataaaatcggtctctggcgttcgctaaaaacagatacctgggtcaaaccctttctttcaaagtacaaaaaggttcttgcagcagcgctgtttttaggatttatgacattcttttgcggaggcgcgttaatgtttaattctggctatctgattagccgctctgcctcaattccagagaatattttgttagtatacattccaatcgttctgacccgagcattcgggatcggccgaccagtttttcgttatgttgaacgactgacaagtcataattgggtgttgcgaatgacatcgaacctacgcctaaaactatacaatgttgtcgaaaaagatgccgttttctttaagcagacccatcgaactggcgatattttaggattattagcagaagatatcaaccatatccaaaacttatatctgcgaacgattttccctacggtgattgcttggttattgtatacttttctgattatcggattagggtacttttcgttaggatttgcattggtaatgttgctgttgttgggaataaatgtgtttgtgctgccgctctggtccgttgtgatcaatggcgctcgtcaagaaaagcaaaaacaaatgaagaatcaattatatacaacattgactgataatgtgctaggagtttctgactgggtattttcacagcgaggagcagaatacgtcgatgaacacaagcaattggcggcaaatctacgaagcgttgatgagaaaatcaatcgttttgatcgaaaaagagatttccttttacaagtgatcttcggggtgattacggttgcgttgattgtctggacaagtcagcgatttcctggcgagcacggtggcttagctaattggatagcagcatttgtcctttgtgtctttcctttggtagatgctttcgcaccattaccttcagcggcacaagaaaccaatatatacaaagattcgattgatcgttttaatgcattaccagaaaaagaggaacaaaaacggacagcatcagctataagtgcaccgttcaatttagaagtgaatcaggttagtttccattatccatctgaaaaagaggtactaaagaatcttagcttaacgattcctgcgcatcaaaaactggcaatattgggacgtagcggttctgggaaaagtacctttgcttctttgctcaggggagatttattgccgacccaaggtagtattaccttaaatggtgagccggtagcaagttttggtgaagatattagcgaatggattggagtcatcaaccagagtccttatttgttccatacaacgattttaaataatttgcggattggtaatgaagaagcgtcagaagaagaagtttgggacgtactgaaacgagtaggcttatcagagatggtgacagctctgccagaaggtttgcgaaccatggttgatgaagcagggttacgtttttccggcggtgaacgccatcggttggcattagcgcgaattcttttgaagaaaacaccgattattttattagacgagccaactgttgggctagatccaatcactgagcaagctgttttggaaacttttttcaatgagttggaagacaagacgattatttggatcacccaccacctgcaaggaatctcactgatggatcaggtcatttttattgaggatggagaattaacgatgagcggtacgcctgctgagttagctgtcgaaaaccaacactttcaacagttattagctattgatcaagggcgactgtaatcaaactgggacctttgccaagacaacaaaaaaattggctagtgatcgacatgaatgtcggcttagtttttgaggagcattcgctcctcaaaacacttcactgtttacccgattggttcgtttattttcagaatagctttcagttgcggaggatagaataaagaatgatcaataatttcgttgcaaaagcagttgcgttagctcgcgaattttttctttgctaggggtgttcggcagcagttcgatgtcggctagtgctttttcggtataagaaacagcaaaatcggtggctttttcgacgccatgataacggcgcactaattcagcaacctctgtggcctcctcggtggtcaactcgctttttttggacagatagctctcaaatgcggcaggattttgttctttagcaaagagcagaggtaatgtatagacaccttgtgccaagtcttcaagaacgggttttttcaacgttccagaatctgctgtatagtccaaaatatcatcaaaaacttgaaaagcgatgccgatgtttcgtccgatctcaccagcccgttcttggttttctaagtcgagaccgccaaaatgagcaccttcgatgcaggccagccagaataattcggcagttttaccattgatgctttgtaagtaatcagcaattgattcatctatattgtagcgtgtgtgcatttgatctaattctcccagcaaaaggcgtttcattgcttgggcatttgtagccaaaaaatgagagccattcatgctctcgatcaataactcaaagaattgggtgaagagcaggtcacctgtgtaaacagcgatatctttgccatattttgcttggacagtgatgcgtccgcgacgcaacggcgaatcatcaatgatgtcatcgtgaatcaaggttgccatatgtaagatttctaatgaagcagcaattttggttaattgatcatttctttcatcaatgggttcgcctagatcagcgaataagaaaaataatgctggacgcagcatttttcctccagaataagtaaaatcaactaatacatcttgtatttctttgttacgaacagttacgcgttcttcaatgatcgaacagacagtttttagtctttgctcgatcgaaggataatcgatccaaaaattcaacatattaaaaccctttctaccagtcattcagcccttattctaacttaaagggagtctattgactagttaagtgcatttatcaaaaggagatgagtatttgacactcccagtatttctggagcttgtggaatttaaagcgaaaacagccagtgtcctcccattttttatcggaatttgttacagctggtataactacggctcaattcatttaggttatgtggtgttatactttattgctatgctgatcttcaacatggcagtagatattttagataattataacgattaccatcacgcaacagaagttcatgattacaaagaaaaaacaaatattatcggacgcgagcagctctcgcttccattcgtttttcgcttaatgatcggtatgatcgtcgtttcggcggtgatgggtatcgtattggcctatttcgtcggttggcccttgttttggatgggactttattgttacttgattggtatcttttactcatcaggtccgcggcctttatcgagtttaccgctaggtgagtttttttcaggatttacgatgggcttcatgatttcgttgatttgtgtatatttgaatacttatgaaacctttcaatggaatagcgcgaccttgggtggaatatttctaatcgcactacccaatacactgtggatcgctaacttgatgctggccaacaacatttgtgatttggaggaagatgaaaacaacaatcgttatacattggtgcattatttaggaaagagtcaaggattactgctatttgttcttttgaacattattgcatttgtagcgatcttgacagcagtggttctgcatttagcaccatggacgatgttgttgacgtttctcgtcttaccatttgtctggaaacagacaaaactatttatgcataaacaaatcaaacgcgaaacctttgtctgcgctgtaaagatccttgcggtcggagcatgtgcgcaggtcattagttttgcgatcggtttgattttataattttttgaaggaagaaaggaagtaataggaaatgaaggaagttgtcattttaggagcaggctacgcagggttgcgagcattgcatgtattacaaggatcaaaaggtgattttcatattacattagtagataagaatgactaccattatgaagcgacagatttgcatgaagtggctgctggaacgcagccaagagagcgaattagttacgatatcgctgatgtggtacgaccacaaaaaacaactttcctacaaaatgaagttgcaacgattgaccgtcaaagtcaacggatcatgtttacggatcaaacatctctttcctatgattatttgatcgtagcattaggatttgaatctgagtcatttgggatcccaggtgttaatgaaaacgcattggaaatggtagatgttgattcagcagaaactatttatcatcatttattgaaacaaatgaaagaatacaaaaaaacacaagatccagatttattgaaaatcgtcgtatgtggggcgggattcactggagtagaactcttaggttctttagtggaaaatcggaaggaatttgctgagatcgcaggtgtccaatcagaagaaatcaaactcttttgtgtagaagcagttacgcgattattaccgatgtttgatgaaaatctgtctgcctatggaatcaataacttggtaaaatggggtgttgaatttctaacaggaaaaccaatcaaagaaatcaagcctggagtagttgtttatcaaacggatgctgaaacgggtgctacagaagaattgtctgctaaaacgatcatttggacaacaggtgtcagtggaagccatgtcatggcagattcaaattatgcggctcgccgtggacgtgtgatggtcaaccaagatttaagtgatccagagcacagtaatgtttttgtagtaggggatgtttcagctgtgatggatcctgcaacaaatcgcccttatccaacgacagcacagattgctttgaaaatggggtatcaagctgctaaaaactgtctacacttgattaaaggtgaaaaaacggaagactttcattttgaatctttaggatctgtagcctctattgggaacacgcatgcctttggtttggtgggtaaaatgcctgtaaaaggttatccagcatcatttgtcaaaaaagccatcatggaccgctccctgttcctaactggtggggttaaagaagtgttagcaaaaggccgctttgatttttatcattgagtcgtgcgctattttttcaacttaacattaacagaagcaagaagagaacatgtaccgatggagatagtttaattataagtaaaatagacagagatgccgattcatgttgggtgtttctgtctatttactactatttcagtttttaacaccatagggcgtaaggcctttattgaatctctagataaatgatcaggttttgaagagaaaacagggtaagaaaaaacccccttttgtacctttattaaaaaaatgttaaaataaagagactatgtttgttgggaggcatgaaatgacgattcgtaaagaaagacgccgtttagaaaaacgattgaagcgttcattattagcaaaaaaagggttgacgatggctacaactgtggtagccggttcaacgattgcaccaaatttggttttagctgcagaaacagcgacttcagatgatgcaaaaaaccaagcagagatcacagaaaatcaagtatctggaggaaatagctccactgattcaactggagacagcattcaaagcagtgctgacgagacgatttcgacagaggaaacaacagaaccaactgttcctattgaagagcagcctgttacaacacctgaggaagcggcaacgccacaggaaactatcacggaagatacagcggtcgttgagacgccaattgttgctgcacctgcgttagcaagaacctcgatcttctcagcacgtgctgatacgagtggatttattgcgaaagcaagtggttatgcaacagaagtagctgccgctaatgatctctatgcatcagtgatgattgcacaagctatcctagaatccggctggggtacttcgactttgacgacccaagcgaacaatatgtttggaatcaaaggaagttataatgggcagtatgtcgaaatggcaacattggaagataatggttcgggcaattattatcaaattatagcgaagttccgcaaatatccatctttaagagaatctttccaagataatgcgtatgtcttacgaaataccagttttgctgccggtagctattattacagcggtgcttggaagagcaatacgagatcatatacagaagcaacggcatggctgcaaggacgctatgcgactgatacttcctatgccagcaaattgaacaatcttattgcaacgtataacttaactcaatacgatagcggcagttctgctgggaacggtgacatgaataatgttgagacccctgtaggagaaaacgcgattcaaaagcaaatgaaaacgactgcatctatgaatatccgttcagatgcgtctactacagcagcagttaccggctcacttactgcgaatacaacctttacggcagttgcggtcaaaacaggaacgagcgtcaatggcaatacaaattggtataaagtttctggcaaaggctgggtcagtggtgcgtatttaacagaagtaaattctggttcaacatcaggcaatgcaaatgataatactgtcaatactggaatcaaccaaaagatgaagacgactgcgacattgaatattcgttctacagcatcgacgagtggcagcatcgttggctcattgagtcaaggcagcactgtgacagcaacggcagtcaaaacaggaacgagcgtcaatggtaatacgaaatggtactatgtttctggcaaaggctgggtcagcggcgcgtatttaacagaagtaaattctggttcaacatcaggcaatgcaaatgataatactgtcaatactggaatcaaccaaaagatgaagacgactgcgacattgaatattcgttctacagcatcgacaagtggcagcatcgttggctcattgagccaaggcagcaccgtaacagtaacagccgtcaaaaatggtactagtgtcaatggcaatacgaaatggtactatgtttctggcaaaggctgggtcagcggcgcgtatttaacgagtgactctagctcatcgtcgaatacatcgaatacaggtgattcgatcaatcaaaagatgaaaacgaccgcgacattgaatattcgttctacagcatcgacaagtggcagcatcgttggttcattgagccaaggcagtaccgtgacagcaacagccgtcaaaaatggtactagtgttaatgggaataacaaatggtactatgtttctggcaaaggctgggtcagtggtgcctatcttacgaagaccgcgacaaatgcttcttcaagtaatagttctgccaataatagttcttcgactaaatatcataccgttaaatctggggacagtctgtggtctcttgcgcaaaagtatggtagtagtattgaccaaatcacttcatggaatcgcttgtccaataatatcatttatgttggtcaaaaattgatcgtgaaatagtgagacacctgatttcatgcaactcaaaagaaaatcaatcagcattacccgatacacattcgtgatatcgggtaatgcttttttgctggtttgttcgtaataaaaatcgctgaagatagatttatttttgaatggtcttttagaatcattctgtttacctctgtcaaagaatccaagcagattttggttccgtcccccctatggagtttcctattttttaggtaaaatagaaaacaaagaaaggagtggagagtatgaagacgattgtttatagtgggatgatgaacggattgacgattgatcgctcacgacgagatagtttctacaatatggtgaagcattggcattctgaatgcgaaatccaatattttatagaagggaaccgctattttttgattggagaaaaaacctataaaatccaacctggtacattggttatgattcaccccgactgtgttcacaatacattctcaggaaagtatatttatcatgatcgtgtactcgttctctatgaagccagcaaatttccaagaatcgctcaatccatgggaatagatctggagaccttttttttaaaacatcatggtatcattcagattccgccagcggatcgctcttacgtacaaacgctcttagcgaaaatcgcagatgaagtgatccacaaagaatacaattaccaggtaatggtcgaaacaaaattaatcgaactttttatttttattcagcggatcaagaacttcagggggctttctgatgaaccggcagaaagtttgggaaaacaaagcgagctagttaatcaaattgcagcctttattcgtcggaactatgcatcgatccattcattggaacaaatcgcttcgtctttttatctcgacaaatcctatttatgccgtatcttcaagcgtgcaacaggctacaccatcactgaatataccaacattcaacgaatccgtcagtctcagcgattactggaagatacagattgggatattgctgaaatagcgagaaaaagtggatacagcaacattacctactacaaccgtgtgttcaaaaaatatacagagacatcccctttgcaataccgcaagaaacaaattgcatacaaagaaagtctgcgagaaaaaaataatttctaaatagtcactcatctttgcacaggcatgaaagggggattattttcctgttaaaaaagtcaatattgtacaagttcgcggatattacgtcacttttttgtgcaagttttgcttgtctattgctgagacattttttgtccgataaaatcagtaagcggatacataaatgaaaaattgtaaacgtgtgcattttatggaggaggaaataatcagatgaaaaagaagatattggttgccagtctttttagcactttagttctagcagcgtgtggatctcagcctgacactactggttctggcagcagtggttcaacaaaagatgcagaagcagtgacgattaagtttgcttggtggggagcggataatcgccatgatgcgatgcaagatgtggtggctctttttgaagaggaatatccgcatatcacggttaacacagagtatggtgcgtgggatggatggcaagaaaagacattgactcagctatccggtaaaactgaagcagacgtgatgcaagtgaattacaattggctcttttcattcgggaagggcaagaatatctttatggacttgaatgaggtcagtgactatttgacgctagacaattgggaaagttcttatttagaagcgatgcaagtgggtggtgaacaagccgcggttccccacggaatgaccggtcgggttcctttgatgaaccaagcactttatgaagccaatgggttggaactgccaacgacctatgatgatcttttggcagcgggagaagtcattgcgaaagggaatacgccaactggtgaagacaatcagtacgcatatctcaatgtgggagagttctcattagatctatttattgctcagatgctttacaactatacagggaagatcatgcagaccgctgggacagtcaactatagtgtggctgaagtgaaagaagtgcttgaaagatataaagaattggaagatgctggtgcactgccgacttttgagcaaacaagcccaatcgatacggaatcaaaccctcaatgggtagaaggcaatgcaggctctgtttatgagtgggcaaactcactggcgaaatggacaaactcatacaaaggcggcgacgggttagatgagttagttgtaggagatttcttgcaagtcgatgctgactctaaaccaagtatctatgtgaaaccaaattttggctacgcaatttcaaaaaattcgaaacatcctgaagcagcagccacttttattgagttcttgtttaccaatgagcaagcggtgaaggctgccggagattctttgggtatttcaagcaacacagtttgttacgatctgcaagtagcgaatcaactagtcgaaggtgctgtggctgaagggtacgccaaattggatgactatgaacaaacggtgttagatccatactttgaagacgaaaatgtgcggggagaaagatatacggtttacgaggcatttcggacaggaaagttcacgtcggaggaagctgcgaagcaattcattgagaaacagcaagcagcacttgataagtattaccaagaataggaagcaacaagaaggaatgcgagacttagctacgtcccgtacccttctttttccgaaataaaattggacatgagtgagaatgtctggaagtaacccattagtatctgggcgttcatttagaaggtaaaggagtcaaatgcgatgttgaaaaaaatgaaaagaacaaattgggtgatctactgcatgctcatgccatggatcattggcttcctagtctttaaagtttacccaatcattatttctttttactacagtttgttagaatatccgattttaggtgatccggagtttgtcggattacaaaattatctagagatttttacaaaagacgatacgtttactgcgagtttctttgcaacaatcaaatatgtgttgattggtaccccagcagttatcattgtctcttttgcagtagcagccatcttgaattttaagcttaagggagtcaatttctttcgtaccgcttattatattccttctattttaggaggaaatgtagctgtttcaattttatggaccatgctttttgatgtcaacggacctgtgaatatggtgttgagtgtttttacactcggaaacgatgtcgccattaactggacaaaagatccaaagttcgcgatttttaccctgattattttaaaaacttggcaattcggttcgaccatgttgattttcttatcggcattgcaaggtgtttctaaaacagtttatgaagcggcagaaatggatggggcttcaaaaataagacaactgttcaatatcactgtaccgattattacccccgtaattttgttcaacgccgtaaatgtattagtcaaagcgtttcaagagtttaactccgcgtatttaatcactaaaggtggaccaaataagacgacttatttcttgaatctttatatttatgatcaagcctttcaaaatgggaattatggctatgcgagtgcactaacatggattttgttggtgatcatcggtatatttacggttattattttcaagtcatctgatcggtgggtattttataatgattaagggggctgaataatggaaatgagtaaatctcgaagacggatgaatgaaatcattcgttatggattattgattggtgtggggattatcttgatttatccgttgttttggatgattggttctgcgtttaaagagaaccgggacatttttggtagcttgagtattttcccgccaagtgaccgtgtggttacaacgaatttttccgatgcttggcagttgacgcgagaccattctatctggtttttctttgggaatacactgaaatttttgattccaaaaacgatttttacagttttatcttgtgtgattaccgcctatgtgattgcacgaaaatcgtttaaagggaaaaaatttgtctttggtgccgtgatcgttacattattgatgccagaactggcttttcgcattccactgtatctgttgtaccgtgaggtgggacttttggatagttttgccagcctttatgtagcggatatttttgctagttcttcgttttttgtatttatgatcattcaatttatgcgaacaattcctagagagttagatgaagcggcagtgatggacgggtgtaatgaatttcagattttgttcaaaatcatcattcccgtaatcaaaccaattctgattaccgttgccttgctaagctttaagtggggcatgaatgatttccaaggaccattgatttatttgaatagttcagataaaacggttctatcagtagcattgaaacaattattagacggtgaagcaatggtctcctatgggagagtattcgctgcttcttgtttggggctgttacctatgatcgcaattttctttatgggatcacggtactttattgatggcgttgcttctacaggaagtaaagagtagtcatatgttgatcagaagaattctcgcacaaatcgttgattttgttttagggattttaaccatatttcttatctttgtaggaggaattccgctaatcggtcgggtcatcaataatgactttgttgctgttttgattgcgatttgtttgatgtgtgttatgtattttgcactgcaatatccattcatgcaaaatcagcagacgattggaaaagcattctttcagctgcagatcgtttcaacagataaatatcgcaaaaatgttccagtggcagtcatttttcaacgagagattttatgcaaactagccagctgtttcttcatttgcctgccgctactgtttggcaaagaaggagggcatgaggcatctacacatacaaagttaagaattggtaaaggagaaaatagttggaagaaataagacaatttttggatcaagtaatcgcacattcttcgccagaagcacctatttggaatcaagaggctcgattagccaatcatccaatccgttggagttatatcgatggctgcatgattctggcgatccaatacatgtttaatgcaacacaagacgagaattatcttgcgtttgttgaaacctttattgatcactatattgatgaggcagggaatccattggggtacgatgaaaaagaatataactgtgacgcaatcaatgaaggaaaactattgtttcagttatatgcaatcactaagaaaagcaaataccgcaaggctctagataatctgtatcggcaagttttgttgcaaccgcgcactaaggaaggaagcatgtggcataagctggtctacccgcaacaagtttggctagatggtttatacatggttcaaccatttgcgatccaataccaactaacgtttggcaactccgcagatgttagtgatgtgattgggcaattcaaaaatgtcatggagtcaatgaaagatccgcgaacaggattgctgtatcacggatacgactgtacgagaactgcattttgggcgcatccaaagacaggttgtagcgcaaacttttggactcgttctcttggatggtatgctatggcattagttgacacacttgaagttttactgtcccatgaaggctatctccaagaaaagcagcagttgcagcgctatttaacagaacttgtaggtgcagtaatggcttatcaagatccaaaaacgagtctcttttttcaagtaacagatagaccagacggtgaagacaattatttagagacgagtggatctgctgctttgagttatgtgatgctaaaagccagtcgattagctattcttccttcacaatataaaataatcggcgagacgatcctacgcgctcttgtaaagcacaaattggttattaaaaacggagaatttacattgaaagatatctgtttagttgctggcttaggggggatgcctggaaaaggcaactacaaaatcagagatggctcctatgagtattatatttcagagccagttgtcaacgatgatgctaaaggcatcggtccgttcgtttatgcttacagtgaatggttgcaactgcagaaccaataaagacagtgattcttatcattttcgtaagcgcaaacaaaccatttggtctccttcgcagagtaagatacaatgaaatggtaggcaacttccttcaatgaaaaggcaagtgctgaaagatagaccgatttcacgcgtacacaaaataaggaggctttcaaatggataaaagaaacctgacgattattggtagttacgacactcgggctgaagcattgacagcaattgatcaattgcgaaacgaagggtacaacaaagacgacattgttttgtttgcgaatgcaacgatcatcgagcagtttggcttagatacgttaagtagtgcagaagtagaagcgactggaggatcagatgatgatcgttcaatgtgggaaaaaatcaaagatgctttctcatttggcgactatgaccatcggacgattgatgatgagagtgatcctttatttgcctatcgtgacgaccttgagcaggatcgtttagtggtaggagtctacgattatcacgcaaccgatcgaatcgaagaaacagatacagcgatcattgatcagcctgttacaggtgagacagcaatgcctgatgaatcggttcatccgacccctcgaatgggagatagtgatatcgaaacaccaattaatgacccaaatcacttgcgtaatttataaaaaagatcccatccagtaaatggtcggcttataatcaaagaaatagcagccctgcaatggctgttatttctttgtatttcagatgttaagcttgtaaaatacgggacaattgctgcaacgaattcttaatttgttgctcgtttcttttttttgtataatagatggagaaaaccatttcttcaaaaaaatgcacggtacttcatataaagagaaggtgagggatagcaatgaagttgaaatttaatttgcagtcagcactcgttagttgttttgtcacgattatgttgagtatggcaattgatcaagacgtaaatgcttttgttgcggccccgttccagcgcaattcttcggagccatcttctgaagcaccagtgcaggttgccgaaacaagtacgtctgaaacggaaacaaccagtgaaactttttatgaagcacgggtcagttcctactccgaaacaactgcacagaccagtggaacaaaatcaaatgaagattcatcggccattccgtctacagaatcagaaagtatagctgacagtagtgaagcagtagtgaaggagacagatacagcatctagcacttccaataatggatcagcaaattctgatactacgactagtacatccgaaacgacgagctcctctagcagcagctcaagtacgagtagttcaacctcttcatctagcagttcaagcagtacaggcacaactacttctgacgaaagtgaagagagcacagaagctggtgatacaccgattgatagtaatgatccggccaatgctgcggatggatcagaaccattaaaacttcttttagaagaaccatttgatgccttttttagataagcgcttcggctaagatagtcagagttttaaaccagcgaatcccttacgactattcatctatttgctgaagtattgagtgattattttgtgcaataaaaaagcatctttttcaagcatatcacaaagtaatttcattaaattcgcttataatgaggtgaaaagggggcgcgctatgggcaaatattttaaaaactttgaaaagctgatcagtgctgttgtcgatattatgttagcaattttagttgtattggtattggttgtgatggcagaagcaatttataaaatcgttacttatgtcattcctttgacaaaagtcagtgatctatcctttttgattgaagagattgctacactatttattttacttgaaatcattttgatgttattgcggtatgtaaaagaaggacatcatattcctgttcgttatctgattctaatcagtatcacggcgattttacgtgagttattgttggcacaaggaaaaggactggagacgttgtttttggcgctggcgattttagtgctgatttttgttttacaagcattagagaagttgaaatcttttcatagctccaaagatatctgaaaaataaatcagaaagttacttagaaatcaaaaataatcctatcagtaaactgaatgtctcagttattgataggattattttttgcgaacaaactagcactttctgcttgtagttgcttcccaatatccgtttgccgtacagtgattcgtttggtttgtcggaggatgattttcttttgcgtcattagatccttccgctccttgattgctgtctgacgatctgtaaatggttggtgagcagcaagtgtcatcccaaaagaattggataacaatgtgtaaccggcgataccggtaacttcctgataggagcgggataagccaccgtcaattaccagtaggtgcccattggctttgattggcgtctctccttttttcacttttactggtgtgtggccgttaatgatgtgtcctgtcgagtctaatccaaacgcagcgaataagcgacggcaaaatgcttctttttctcttagggtatagtaggcgtttttttcttcaatatgcgtgtgtttattactgatgaaatagcgctcgaaggttttcatggattttttaccgaaaagagaagacccttctccgcaccagagataccaaaggacatcggtcgccagatcgtcggtcctttctggtgttgcgaaactctgttttacacattcttgaaagaaatccatcaatgctttgccctgataagaggtttttccaaaggacactgaaaggaagcgaccatcaggatgacaggggatgcaaccgtggtacagtagattgccattataaatttgatagatcgtgcctttttctactagaaaacgtacatgggttgctaacctttcggaggattgaaattgtttgagaagatcctccagtactttttgctcttcatcagtcaaaagatagggtgcttcgggatcaaccaattgaaagcaagcatggatcagaggctcaaagtgatcctctagctgaatctgcaaatcctttgtgattttacccaatagcaaacgatccgctaattgaaattcggggcgtcgtttgatcacagcggcctctaccttgaattgaatgattgcaaaggcttgctggagaagcatggcgtcgtgaatttcctcttcggaaagatcatcaacagttttcttaggataaaaccccttattttcttgataatgtttacgactaaatgctatggctttagagaggtcgatgccatagccttctttcaacaatgctaaatttccataccgtgcagcgatccgtatggtacttgccaaacaagggaaagaaccgcagtaacttccgatccacaaaatatcatggttccctaattggatatccaaagaaggaagcgccatgagccggtcgatgattttatcaggtgcgggtccccggtcataaatatccccaataacatgtaggtgatcaacgacaaaacgctgaatcaaaaatgctagctgttcacaaaatagaggcgctaaggataagtcgatgatcttatcaaaaatcgctttataataggcttctttgttgaagtccgagtcatattgatacagcaattcttctaaaatataagcaaattgttttggtaaagcttttcgaactttggaccgcgtatatttgctggaagtaaaacgagccactttgaccagttgagtcattaattggatccaatcctcatgcggatagtctttttcttgcaatacttcttttggatagtaaatcaaaaaacatagctcggtcttctcagcagctgtcagtgagtattgaaacaatgtttcgactttttcccgaatgctgcctgaaccattgcgcaagatatgatcaaaagcttcatattcaccgtgcagatcactgacaaagtgttcggttgctttaggtaactgctggatcgcctctaaattgataatctcaatgaaatcatttaattgatcttcagtgtgcataggcattatttttgtaaaattcttcgatcaacatcgaactttcttcgatcgaccgtttgctgacatcgattacattgattcctagctgttggaataattgattcgcataggctagttcatcatcgatccggcttggttctgtgtagttagtagtttctttcaaccctaatgaagccagtcgagaacggcgtatttcgacgagtgagtcagaatttgtagtgagcccgatcatttttttgggatcgatttgattgatctctttgggtaaagcgacctcaggtattaaaggcagattagccactttgtaaccacgattagccatatatagacttaacggtgtcttggaagtacgggaaacaccgagcaatacgatgtcagcatcgagaaaaccacgaggatccttgccgtcatcatacttcactgcaaactccattgcagcaacacgactgaagtattcttgatttaaacgatggattgcgccaggttcctgaactgcttgtagcccgacggttgcttcgattactgagatcaatggcgtcatgaaatcgacatgttgaagaccggtgcgtttagcaaaggcttcgacaaatttcactaaatctttgttaacaagcgtcgtcacaacaatcgatttatccagtaaagcatcttgtaagatttccaataagctctcttcatcatttgtaaaaggatacagttgaatatcggatagatcgatcgtaggaaattgtgcggaaacggcactaatcaatttttgtgctgtttcaccaacggaatctgaaatcaaatatagtcgaacattcttcatttttttcgctccttagaattgattgttttcgatcgcattgcctgcttggatatagtagttcataattttagacttggttattttaccaatgactttttttggattctcagcatcaacaacagggagtgtatctatttcatgcctagctaataaggtacctgcagtcaaaatagtttggtcggcagtaatcgtgacgatattcggcattcgcgtcatgatcattgccaccggtgttttttctgctgctgaattgctgatagcgaagcgcagaaggtctttgcgggatagaacaccaattagttcctcttctgcatttttcacataaagagacccgacatcatacatgaatagggttgtcacagcatcatataccgaaacggattgctcaatcattaacggtgggatcataatctctgctacttttgcatggtatagcttatcaaacaacagcggttctacggtctgtccggtataaaaataaccgaccttgggccgggcatcgagtaatccagtcattgtcaggatagagagatcattgcgcaaagtagcacggctgaatcctagtttttttgcgatggtttcaccactgataggttgattgtcttttacgatttcaatgattttaagttgtcgctttgtcaattccaatgtgtcaccttctttaaataaatgtgatatgctatttattatatattttccgcgtggaaaatgcaataaaggattttggcgcgaatttttcttaaaaatttcttcttgacgaatcaatagtgtacgctatatacttcgttttaagcttaatagtatatcacattaggaaggcggaaaaaaatgaagaatatcgtttggttctcagaaggtacgaaagatcaaaaagaattactaggggggaaaggagcaaatttagctgaaatgaccagtatcgggttgcctgttcctgcgggatttattgttacaacagatgtttgccgacaatttttagaaaaccagcaacttacacagccgttggtagaagaaattattcgagcagtagctacattggaagaacgaacccacaagtcttttggcggaaaccagcagccattactggtttctgttcgcagtggggcaaagtattccatgccggggatgatggatacgattctcaacttggggttaactgatcaaacggtacaggcgctggcagcgaatacaaagaatcctacatttgcctatgattgctaccgtcgccttatccaaatgtatggggatgttgttaaagggatcgataagagtcattttgaatcctatttaacgacctataaacataaaaagggatatccttctgaccaatcaatggtcgctccagactggcaagagatttgcgaggttttcaaaagtatttatatggaacatacgcaagaacgattccctcaagatccgctggaacaattattatcagccgttcaagctgtgtttcgttcgtggaataatccccgggctatcacttaccgtaaaatccacaaaattgctcatgatctaggaacagccgtgactgttcaggaaatggtttttggcaatagtggtgctgcaagtggaactggcgttgcttttactcgcgatccgacgacaggacacagaggattatttggtgaatttctcgcttgtgcacaaggagaagatgttgtcgcgggggttcgtacgccaagaccgattagtgatttagccaaaacacaaccagaaatccacgcgcagttttcggcgattgccgagttactggaaaatcattacaaagatatgcaagatatcgaatttaccattgaagaagggcgattatttgttttacagactcgtaatgggaagcggacggccaaagcagctgtacagattgctatcgatctagtttctgaaggaaagatcacgaagaaaacagcactgcatcggttgacaccagacatgctggatcagttgctgcatcctatcttttctccggaatctcttgcgaaagcttctcctcttggtcaaggattgcctgctagtcccggtgcagcggtaggtcgtgtttacttttcggcagaagcagcggttagtgcacaccaagcgggagaaaaagtcatattattgcgacaagagacttcaccggaagacattgacgggatggtcgttagtgaagccatcgtgacttctcgaggcggcatgacttctcatgcggcagtcgttgcccgaggactaggagtatgttgtgtggcaggttgtgatcagttagctgtcgattcatttttgaaacaagctcgatgtggtgaagtaatcattcaagaaggagactatctatcagtggatgggacgacaggcaatctgtatcaaggggcgctatcactggttgcctcgcaagattttggtttgctgcagacgattttagactggtctaaagagagagcagacttagtggtacgtgcaaatgcggaaactatcgaagaaatcaagacagcagcttcttttggagcagcaggtatcgggctagcgcgaacggagcatatgttttttggtgaagctcgaatctggccgatgcggcaagtgattttagctgaaacgaccgaagaaagacaagtagctttgtctcagctgaaaacgtttcagttaaatgacttcaaggagttattactgcagacaaaagaacagaaatgcgtcattcgtttgttggatccgccgttgcatgaatttttaccgcgaccacaagaatatgaagaaatggccaagcgcagcggctattctctagaaaaaatcaagcaacgaatccatgatctacaagaagtaaatccgatgatggggcatcgaggaagccgtctaggaattacttatcctgagatttatgagatgcagacagctgcaattatcgaagcggcactacaagcttctgaagcaggaagtgttgtttatcctgagattatgctgcctttgatcagtattccggaagaaatgcgcgttttgagagaacgtcttgaaacgtacattcggcaaatttttgcccactatcagaaagaagtacctttcaagattgggatgatgctagaaacaccaagagcatgtttattaacaaaagaattagctccgctagctgattttttcagttttgggaccaatgacctgacgcaaatgacttttggattttcacgggacgatgctgctggttttattcaacgctatttagataaaggaatcctgtctgaggatccgtatcaacatcttgataaatcgggagtaggacaactaatggaacaagcggtggcttcgattcgtcagcaaacgaagggaaaagcgattggtgtttgcggtgaagtaggcggtgatccacaatctattgcattcttgcgggctattggtgttgattatgtttcatgctctccatatcggattccagcggcatggttagcaattgctcagtctgcatcataattgcttatactctgaccatctatattgctacttgagtggagtctgcaatgaagttgttaacatgcggtcattatcaacgaattgtctgtttttctaaactgttaatttatgaatagctcgaacattctcaagtaatttgatcttcagtataccggttttctaaaagagtctattactatcgttctaaaagcccacctttggctgttgaaaaaatatatcgttgttttttgattctatggaaattcttattgtgctcgtttaactaaaccatgcggtatcaccgtatggttttttagttgattctacaaggtttttagctattgttttgagtggtttctcctacaggacgatttcggttcagtgttatttgtatggtggaaaagcaatggctgcattttctactaatgaacgctcttaatagttcggtgaaatgaccgattatctttactgagggtcgtcttcagacgagtcttcattggatagtgtgaaattgtaaatgaaggagtggcacatttgtgaaaaaaaggaaaaaaacgataggaatttatgtgatggtcaccttgattttggttgcggggatcccgatcattgtcatgctgacaagttcttatttgaccacaaaggatttattgattcaacgaaatgatttgaataaagaaagtgccgttaatttgattttggcggaagaaaaaagcttacgtcaatcgacggaaagaaaattgaagtcaatggctgaactgccatccatgaaaacagaatttagtatggcacgtatccgctcagatctttctttagcaattgctggaaccaatagctttctagaagtgacatttggaacggaagatgatgagtatgtgaccttcaaccctttgccagatgattacaaaccaacgactcgtccttggtacaagggggccgttaaagccgaaggagaagtatattggacagacccatatttggatacggtaacgaaccaatttgtgacatcagcctccattatgattaagaattcccataatcaagtaggggttttgagtgtagatgtttcatatgaaagcattcaagacattttgtctgactttaccgttggacgaacaggaaatattacattagtttcagaatctgggatcattgtcacttcaaagaacacgaaacaaatcggtaagaatatcaaagaagaagaagtattccaaaagatcaaagaagcaaaagatcctaatggtaaggtcggtttgggcgactcaaataaagtcaacgatgtgttgtacgacaaatctgctgattccaatgtttgggcttattccgaagtcaaagccagtgatttagataaagagttaggagcgttagtccgcacgacgatcatcgtcacaatcctgatgttgctatttgtaggacttgtttcctatgcggccattaaaatagtagcagcgatcatcgattgtttcaatcactactttagaaaagtcggtgaaggcaaactagagaagatgagccagtctaaaagagttaaaggcgaaaaatggacttgggaccagttagcccgtcgagtcgtttatccagataaaactgggaatgagattcagcaaatggcagacaattataatgtgatgatcgaaggcactggcgcattgatccaaaaagtgcaaaaagaaagtagtagtgtcgcagaaatgtccgattctttattggaactttcaaaacaaaccaatattgcgacagaagaagtctctcaaaccatcacgggtattgcagaagttaccggtgcacaagctcaggaaacagaatatagtgtgtcgcaaatgcaaaatcttacgcaagtaattaaagaattacgagataacgttggcggaatgagcagcaagtcgcaagaatccacgaagattaatcaagaaaacttaacgatcatggatcaagtcgatgacagctggcgtcaagaattggcacagatggaacgcttaatgtcaaacatgacgggaatgaatgatagtatccaaaacatcaattcaatcattggggtcatcaacgatatttcttaccaaacaaacttgttagctttgaatgcttcaattgaggcagccagcgcgggagagtccggtaaagggtttgcagttgttgctgctgaaatccgtaaattggcggagcaaagtaaagcttctaccaaagaaatcgaagcgattattgaagaaattcgtgagcaatctagtcaaatggtcaaacagacgtcagcttctgtaaaaggtggcgtacgacaaaccaacttaattaaagaagcaatttcgtcttcaaaagaagtatttcaacgcagcagttatatgattgaaggtattcatcatattgaagaagcaagtgcacgtattgaaaacattcaaaatagtgtgttggaaaacttagaaaatatttctgcatcaacggaagaaaatgccgctggtacacaagaggtttccgcaaacgcggaagaagttttagctaccatggatgaattcaccaaccatgtggcagacctaagagacatcgcggaagaattgaagcgattgactaatcgatttgaagtggaaaaatagaacaagaagaaaacattcatcagctattcgaaagcatagctggcgaatgtttttttactatcaaagaagatgctacaaaaaaagccaagactgatgtcagcagtcttggcttttcatgaagatgtttataaacaattattgctggttagtgagccatttctgtccgctggatgatcatctctacacgacgattttccgagcggccttgcggggtgttattatcagctttgggttccgtatcagcaaaggcttgaattgcggcattcttttctaagacggcccctttactgatgaaatactccataacgttaatggcacgggccgaactgagatcccagttggattggtatcggccattgcctttttccggtacgttatcggtatgacctgcaatcactattttgttggtttttagttttttcagtgagtcagagagcaaatccagtgactgccgagtggtggctgtgatctcagcactgcccgatgtaaacaggatactgctagccaaagtgatatggagcccatcagattctaagcgaacttctgtttgatcttttaggcctgaagaagctaattcttgtgatagctgatcgctgattttttgcaattgttgattttccagttgagtccgtacagaggcttcctgtgcttgtgcttccgtagatgtgggtgctttttttcccgtattagtctcccccatatcgatcacggatccgatcacagaggagctgctatggtgactagaaaggatggtgccaaattcacttctgatttcttgaaatttctcatcatcgactttcgccatagcaaacatgacaatgaataaagccagcagtaaggtcaacatatctgagtaaggcaaaagccacgcttcgtctacgtgttcttcatgtttcttttttcgcttcatatcggttcatcctttataattgttcttcccgttttttaggatcgatcaagctatataatttcttctcaatgctttttggcgattgtccggcttggattgctaagaccccttcaacgatgatcgacatcatttggacttcttgctcagatttcaaggatagccttgagctaaagggaatgaacagaacataaccgaagaaaataccataaagagttgccacgaaggcagctgagatcatgtgtcctaaagcttctacatcttctagattgcctagcgccccaatcagcccgatcacggcacccaagacccctaaagttggagagctagttccagcggttttgaagatagacgagccaatacgatggcgttcttctatcccatagatctcattctccatgatttcttgtatctgttcggcagcaatgccatcaaccaccatttctaaaccttttcttaaaaatggatcttccaagttttggatggcgccttcaagagataataaaccatcacgacgtgcttggttggccaattcaacaatcgtattgatcgttgtttttaagtcgtattctttatttttcagcagaacgccgaagattttcgggatttttttgatatcactgctgggaaatgaattgataacggctgcgatcacaccgacgaaaataatgattgcggctgcggggttgattaggacagccacattggccccttttacaatcattccaaccaccacagatatcaatcctaaaataataccgatcagcaagaaaaaatccatttgttgcgtcctcccaaattctttattccgggttttaacccttttctatttttatcggtgaattaaaattattcttaatagcaaaaaaaataatcctaaaaataactgagataaaattactgattcttttaatttttgtttttttggataaaaagtccaagcttttttatgaatggtatagtttgtagatcctgtggaaattttcagatggtatcgtttttttggtgaagtatttctcgtttttttaccatttatacaggcgttcagtaaaaaaaagttaatcatttatatacataatgaacgtttttttatcaaaatgcatccttttatagaaaactaaagatagccatataaagcgtttaatcgagagagacttctttttaaatttgctgatcagtttgtgatgaaacctaatttaataaataacataacatgattgtaacttaactgacatatctgtaaagttgtaaaatcaaattgtaaaataaaagcaattctactataatgacatcacgtgttcttgtttttttaatctataatataaaaaaatattgaaaaaaataaatatatttttctctggcccataaaaaaagcatttggtacagaatatggaaggagcaattactgttggatacctataatttattaaaaacagccatgaacgtttctgcacaacgcgcagaattgatttcgtctaatatcgccaatgtcaacacggatgggtacaaagcaaaacgcatcgtgtttgaaggcgaattaaagcaggcactcgcttcatcagggacggacgctgcaacagaagcgtcagtttctcaagtaaaaccgaaaatcactgaaaatgcaactaccagcatcaaagacaacggcaataacgtggatcttgaagtggagatgttggatcaagcagccaatgggttatattacagtgcattgaccgcacaagtcaacggacgcttgcaaatgatgaaccttgtattgagtaattgatagaaagcgcaggaaaaacaaatgggtatgtttaacggactaacgatcaatgcgagcggtctagcattggaacggttaaaactagatacgatctccagcaatatcgcaaatgtaaatacgaatcaaacacaaacaacagctgcttatcaaaaaaagagtattcttttttcagaaaatttaaaaaatagtcgcgaaggaacaccggctacatatggtgtcaaagtgacggggatcgctgccgatgagacagaaaagctgacctatgatcctaccaatcccgctgccaacgatgagggatatgtcggtcaatcaaatgtggatattgccgatgaaatggtggcaatgttgcaagcggttcgaacgtacgaagccaatgtttctgcatccgaaatgaataaaacgatcttgaaaaaagcattagaaatatcaaaggggtaacgagaaaatggatggacttttaacgacaggattaacagactaccaaaacgttttgcggacactaggcacgggggctgcttcaaacgagaccagtgttgcaggcgccaaggaaaatcagttttcttcctacttgacccatgcggtcgatcagttgaatcaaaaaacgacggtcatggatcaagatactgtaaatttgatcaccggcgatgaaagcgatctaggcaatgtgatgattcgtatgacggaggcgcaactggcgctacaaacagccgttcaagtaagaaacaagtgtttagaagcttacaatgacgtgaaaaatatgcagttttagcagtgggtgagggaataaggataaatgatggataaagtgaaagaatggacagaacaactcaaagaccgttggcaaatgcaaagctctttaaagaaaatgatcgttgttctttccgttatcagcgttctcggaatcacagcagctgtttattatttaaatacgcgaattgaatacggtatcttgtttacggatctgagcgatgccgatgcgggaacgatcagcaaggatttggaggaacagcagatcgcctacaaattagctgacaatggaacgacgattttgatcgataaggaccaagtcgatgaataccgcatcaatcttgccgtggacaataagttaccaaataccagtacaggctttgaattatttgatgatgccaacatgatgacaacggacgaagaccgcaaaatcatgtatcagcgggcagtaacgggcgaactacagcgagcgatcgagtcgatcgatgcagtcaaatccgccaaagttttactcgtgatgccagaagaaagtgtcttttcttctgaggaaagtgcgccaaccgcctccatcgtgttgaccttgaaaaatcagcagatctcagacgagtccgtgcaagggatcgttaccttgacttccggcgcagtggaaaagctgaagccagaaaatgtaaaagtcgttgatagcgcgggcaataccttgactagaaccgaagatgaagccagtcaattaagtggcctgaacaataaatacattgccatcaaagattcctatgaaaaaacgctagaagaaaaagtagcgaagttgctgacaccgatctatggtgcagacaaattccaagtgtcgatcaatttagacttgaattttgattcgatcgagcgaaagaaagtcacttatgatgacccagagatcaagagtgagacagtgcaggctgctggttcgcaagggaccgtccaagaagcccaaacaggcacggtggatgacaatgtctccaatgtgacgggcacagatggagagggaaacaattcctacagccgttccgttgaaaacgaattggataccgagaccaccacgaccattacggcccctggcatgatcgaacgaatgaccagctcgatcgtgatcaatgcgaacctttcgcaagcggatcaagcagaattgcagcagttgattgctagtgctgtcggctatgacaatgaccgtggtgatcaaatcgcgatccaaggatttgactttgcccaagcagaggttgatccagccgctgatccgcaagggaatgaaccgattgcagctgccaaaggttatctcaagtatgccatcatcggcggcatcgtgttgaccttgttcttagtgatcttaatgatcgttggcgtgatccgacgtcgtcgtaaagaagacgagctggaagtcgatgtgacggaggaaatggtcacttttgcacaaccgtccgcagttagcactggagcaagtccgacagttgcacaagaagtcgtttttggtggtgtcggcaatcggtctgctgaaacgaaaccagcggcgccagaagcatccacacaagaaaccgcagcagaacattcaggagaaccaacattggatcaaacggctagaaattatgccgaaagcaatcctgaagtagcggcggaattaatcaaagcttggatgaaagaaaaataagggggcagccatggatacaatagatggggtaaaaaaagcagcgattcttctgatctctctaggatcagatacctctgcaaagatcatgaagctgctgccagaatcatttatacaaaaagtgagctatgagatcgccaacatcgactttgtcagtcccgaagagcgggatcaagtgttggaggaattttctcataccgcaacggcccgcaaatatgtcttagacggcgggatcgattatgccaaaaatttgctgaaccaagcattaggccctcaaaaagccaaagaagtcattgacgtattgactcagattcagctgcgggaacggccctttaatatcgctcgcaaagccgatgttcaacagttgaccaatctgttgatcggtgaacatccacaaacagtagcgttgattttatgctacatgcagccggacaaagcggccagcgtcttgtcgcagtttcctgatcatttgcaagtggagatcgctgaacggatcgggacgatctccagtacgtcgcctttggtgatcgaacggatcgaaaaagtgatcgagaacaaattctcgaattacattgagaacgatacggaaaatgtcggtggtgtgcacacactggtagaaatcttgaactcagtcagccgcagcaccgaaaagaacattttgaacgacttagaaaagcggcaaccagaactatccaacgaagtgaaatccagcttgtttactttcgaggatatcgtgaccctcgaacgcttggatgttcaaaaagtcttacgagatgttcaaaacgatgtcttagtcttagcgcttaaaggcacgaccgatgacatcaagaactttattttctccaacctctcatcacgggcggtggaaaatctacaagaagaaattcaatttatgggtcctacccgcttgtctgctgtagaagaagcccaacaaagtgtggtggctgtgattcgacggctagatgaaaccggtgagatctacatcggaaggggcgaccaagatgcagtggtcaaatagcagtttattgaagcagcaggcggtcaaaacgaccgaagctgctcgcagtattttgacggatacgaccatcaaagtgccgattgagaaagcaagcttagacccagaactgcaagcggctagacgtgcacgccagttggagcaggaacggcatttgcagcaaatggaagccttgaagcagcagattttgaccgatgcacaagcacaagcagcgcaaattctagcagaagcgagagcggaaggctttcaagcaggacaagcagacggctttcaacaaggctatcaagaaggactcaatgccagcaaagaagccgcgcaagcattgatgtcacaagcccaagccaatgtcgctgaagccgtttctgagatcaacacctttcgctcagaaaaaaagcaagaaatgatcgcttacggcacggcaatcgccgaagccttaatcaatcaacgttttacagacgagcaagcaggcttcctgccttttgtggagtctgtgctatggcaatttgaacaacccgatcaatttgtgactgttcgcagccaagagcagcatcttgcagcgttgcgagaattgatggaaaccaaaaagcaggcgatcagcgggtttcgctatttactcatggcagatgacagcttggcggaacacgatttttgtatcgaaactgaaaatgccttggtggtttttgaactgaggaaagaaatcgatcgctttttgagccaatttctagaaagcagtgtgaaggaatgacgtttgaattaccgatcacagagatgcgcaaaacggcgcaatcacagccgttttttaccacctacggcaaagtcagcgaagtcgtaggtctgctgatcaaagtcgaagggctggcggttttcataggagaaatctgtgaagtcgcactgcaaaacaagacacatacagctttagccgaagtcgtgggctttgtgaaaaaaaccgtgctcctgatgccccttgatcagctagaaggcatcggacccggctgtttggtgcggccaactggcaaatcattgacggtaaaaatcgatgatacgctgctagggcacaccttagatggactaggacgaccgttagatatggcgctggatctggaaagtgcgccagaatatccagttagtcaagattctcctgacccctttcgtcgtcaaaaaatcgctgagatcatgccgacaggtgtccgggcgatcgatggtctcttgactgttggccttggccaacggatcggcatttttgccggcagcggggtcggtaagagtaccttattggggatgctggctcgttattgcgaagccgatgtcatcgtgatcggcttgatcggcgagcgaggaagagaagtcaaagaatttattgaaaatgatctaggcccagaaggctaccgcaagtcggtcgttgtctgtgctacctccgatatgccgcccctcgtacgactaaaaggggctcatgtagcaacggcgatcgctgagtattaccgcgatcaaggcaagaaagtcgtattgatgatggactcggtgacgcgttttgcgatggcacagcgggagatcggtctatcgacaggcgagccgccgacgaccaaaggctataccccttctgtgtttacagctttaccgaagttgttagaacgcagtgggatgtcggacaaaggctcgatcactgctttttataccgtcttggtagaaggtgatgacatgaatgaaccgatcgctgatgcggttcgggggattcttgacggacatattctgttgtcccgaaaaatcgccgctcaaaatcattatcctgccatcgatattcaaaatagcctcagccgcttgatgaagaccctcgtttctgagaagcagcataaacatgcgggggaactaaaagaaaacatggccgtttatgcagaagccaaggatttgatcgatatcggtgcctacaaaagcggcagtaatgcgttgaccgaccaagcgatcgcgctgcatcaccccatcctacggtttttacagcaaaaagtggatgagcggatcccatttgaacaaacgatttttgaactggcgcatttgttcagtgaagaagcgctgatcgagcgccagcgttcaactatgtaaaagagatcataaaggagcagctatgcaagcatttcacttttccttagaaaaagtattggatcatcgaaaaactattgagcaagaagccaaacgaacttacgcccaaaaacaacaactattgattcagcaagaacagcgcctgaatacgctgacacaggaaaaagcccagctttttgatgtcaatgagatgaccattgggcggatgcaagtgcagcaacgttatttgcttgcgttgaatgccaccatcgatgaggttcagaacaaaatgtttcacgtgaagcaagaattggcagagtcgttatcggtggtggtagaagcgcagcaggaacgcaagatcgtggaaaagctgcgagaaaaacaatttgctgaatacatctatgaagagcaattggaagagcaaaagcaattggatgagttcggcaatcgcgccttattttcttaaagaactaatggttttagtgataagacgaccttggtttcaaagcatcagctgagaggaggtgaacaatgaaagagatcacaacaagtgccgtatcccctgtacctgtcggcagcaaatcaaaaaagacggaggcgtcaccagaagccttcagtttgctgatgcaacagctgacggaacagaccgcaagcaatctgtcagcaccctttgaaacatcaggtatgacggagcaaaacgccgttgcaccagaaatgtgggttgccagcagtatggaacatctgccgcaggagccagaaatcacttcagcacccgaacagcttgcaacgacacaagcgccaggaatgagccagatcagccaggcaccttttgcagacttggttcatgaagcgccacaggcatcgatggtaacggcggagcagaaccaaacgagcgccggcacagcagcttctcccgacagtgtttcagcagctttagcaccaatagacgtagccaccacagtcatcaacccctccgagtctacgcttgaaggtctagatttgatgacaaatgacagaagtgaagccgcagcaacaacgcttgaaactcctttgccagaagacttagtaggcgaagagcagtccacggcaaaagggatcgctcctttcaaggaaatcaaggaaatcgattcagtaacaaaaactgcgattgcggagacgacagaagcacagctgaaacagtccaccgaagggaccgctcaattgggccaaaggggaccattggatcaagcgtcgccagtgacccaccaagcgacggatacgactagtaccttgcaacgcacgaatgaaacagtcgccaaaaaagcggaagctgtttctgcacaagccattgcttcttcaacagcaactgacaatgaaatggtggcaccagcgctgcaactgcttgatgtttctccccttttgaccaagcaaggacccacgccaacaaaagcgaatatggaacaagcggtcctacccttagcaaaagcggctgcccaactcgtccaaacgagcagcacggcaagcgagaaaaaaatcacgctgcaattcgttcctgagaaattaggcacgatccagctttctctagaaacgaatgcccaaggcagtcgcttagaactgactgttcagcagccgcaagccaaagaattattgctgtccatcaagcatgagctagagcaagttttgcaaaagcaagagcagccgatcctagtgatcaaagaacctacgttagcttctgtccagcaggctggtccgctgtcaaatcaatcctttgccggcagtatgatggcaagtgacagtcagttaagccaacagcgttttttacaggctcaaaaaggacaaagcaaaaagccgtttcatcaaagcaatacggctgaagaagagcagcaattagcaccgatcgatcatgcgatcagtattttagtgtaaaggaggagaactatggcagatgaaattacagcagctgcggccggtattgccaatacatcggcattaacgcaaacaaaaaaatcttcagatatctccatggatgattttttgaagatcttagcagcatctatgagcaacccatcgatgggaggcagcgattcttctggtggtggtagcaccgactatatctcgcaactggttcaatttacgaccttagagagcttgaatgaattgagcgaaacgttgacgacctcggtgattttacagcaacagcagcaagcttttagcttgatcaataaacaagtcaccctgatggacggcacagaaacattgtcaggaaccatcgaaaaggtccgctttgccaatggctacgccacgatcgtcgtaaatggcaaagaatacagtatgagtgcgatccaagagattggtggcgaagcaaaatgagtttgacgattcaacaggggctgcaaaaagttgccggggagccttatcaaaatccccgcaaagtcgtggacaaacaagccttttcttcaatacttgaacaaaaacaaaacgacatcaaagtctcgcatcatgcgcaaaagcgtttgactgcaagggaattgaccttacaagatgatgattatcaatccctttcaacggcgcttagtgagctagcggaaaaaggcagcaaagaatcactgctcgtttacaaagatatgggcttgatcgccgatgtccattcacgaaccatcattacggcgatggggatgaatgaacttcacacagtcaccaatattgacagcgccacatttatcaaatagcagctggactgaaaaggggctgcaagtattttctgaatgacagaggaaaatacgccaaccataaggaggaaaacaagcatgttacgatcattatattcaggtgtcagtggaatgaaaaatcttcaaacgaaaatggacgtggtttccaataatatcgccaacgtcaatacggttgggttcaagtcaagtcgtgtacttttccaagacatgatgagccaaacgatgtcaaacgcaactgcgccaggcaacgggttaggtggaatcaacgcaacgcagatcggtttaggggttcagacgggctccatcgataccatcaatacagtcggtgccccgcaatcgactggccgcagcatggatttttatatcagcggacagggctactttatggtacaaggaccaggagcaaatggcgaaacctattacacacgagatggcgcattcgttcgtgacagcaacggaaccttgaccaatagtgatgggatgcaagtcttaggtcgttcagtcaccggcggtcaaccggttgtctatgatgacaactttgatgaaaacacagcattgagcggacaagaaacggtatctcccttatcaattccaagtacactgaccgtcaatggggaaaccttgacctataactccatggcaatcgatgccaatggcttagtgttggcaaaatacggcaatcaaacctttgtgatggggaaagttggtgtcgcaacctttaataacccagaaggcttagaaaaagtcggcggcaacaactatgtccaaactagcaactcagggaatccaatcgtcgcaggccctggcaacaacggagcaggaacgctacaggcgggtgccttggaaatgtcgaatgtcgatctttcgacagaatttaccgaaatgatcattgctagccgtgcctatcaagcaaattcaagaagtattacgacttctgatgaaatgctgcaagaattattgaatctaaaacgttaagaacgtgacgcttcatcattgagaggagtttgaccatgattctagtgacagcattgaatggcaagccattctatttaaatccaacattgatttatcggatcgaagaaatgccggatacattgattacactgacagacggcaaaaccttagtggtgacggaagctgcgcaagaagttgcgcagcgggtaatcgagtatcatatggtgatccattcgaaccaagtgaaaacgtaagggtgggaaagatggcaaaagaagaaaaagcaccaaaagcagaaaaagagaaaaaaggcttgagtatggttgttttactgccgatccttttgattgtggtagtcggcggcagtatcggcggtaccttagtgacgaatcactttttgacgggggaaaaaacagcagctgctgaaacagcaaaagacagcagcaaaatctcctcagacgaagcgatcgtggcactggatgaatttttagtcaatctggcaaaagaagacaaccaagagcagcaatacatgaaggtcaatttatcgattttagtcgccgatgaggaaaaaagcgcggaagctacgaaaaatgtggccgtcattcgtgacagcgtcgtaaacttattgcgccaacaaaaggccagcggtattttgagctccgccgaaagtgtaccgaatttaaaaaaagcattgaaagaaacaattaatcaggaatacggatcagaaatcgccaaggatgtttatgtgacggatttagtgatccaatagaaagaggcgtgttgatggaaacatttttatcgctggtcaaaatgattgggtttttgctgcttattctttatttgatcaacatcagtttgaaatatttaaatcgttacacgaaccagcacaatcaccagttgcgtattttacaaaaaatcgccgtcagcaagtcgtcttcgatcgggatcgtccaaatcatggacaaatgttatgtcatgagcttttctgaacagcaaaatcagatcatcaaagagttgacgccagaagaaacggccgcttttttacagcaaagcctagaaaacacccaagtgcaagctggcaaagatttttctgaatggctcaacaaagccaaggcggaaattgctggaaaacgaggcaagcaaaaatgaagatcaaaggcagagatatcaagatcatggctgcggtccttttcagcagtttgatgcttccgcagacggcgtttgcgctcgacacggaagacgtcagctccaccatcaacaatttattgtcgaatgggaatggctcaagtgatacgatcaataccttcttgttgctgacgctgctttccctcttaccggtcttgctgatcatgatgacctcttttactcgtatcatcatggtcttgtcctttgtgcgcagttcgttaggtacacagcaaaacccgcccaatcaagtattgatcgggttggccttattcttgacattttttattatgaaacctgtgtataccgacatctaccagcaagcgatcgaaccgtttgatcgacaagagatcagccaagccgaagcttttgaccgctcagaaaaacgaatcaaggcctttatgatggtacagacacgggaaaaagacattgccttgtttgcggaagctgatggggagaccgaaaagtatcattcttctgacgatgttcctctgaccgttatggtaccggcttttattatcagtgaattacgaacggctttcagtattggctttttgatttttatcccctttttgatcattgatctggtcgtctccagtatcttgatgtcgatggggatgatgatgctgtcgccgatcatgatctcactccccttcaagatcttactatttgttttagtggatggctggtatctgatcgtggagtcgctgatcaagagttttcaatagccgctaagaaaggagccaagaggaaatgacagtagaaatggtacttgatgtgctaagggaagcctttcttcgaattttagcgatatctggccctgccttattggtcggcatgctcgttggattggtgatcagtatttttcaagccactacccaaatccaagaacaaacgttgagctttgtgccgaaactattagcgatttttttgaccttgattttggccgggaattttatgctgaatctcttgttgaattttaccaaaatgatcttcaagatgatttcagcaatgtaaggaggaaacctgatggcgccgattcaagcgacggtgttgattttttgtcgaatattggcgtttgtcgtcctttgtccgatcttctcacagcaaaattttccgtcactggcaaaaatcgttatcggcatggcgttgacggtcctatgtctgccgacggcacctgcgattcccgagctttccctctttatgatgacggttttcgtcatcaaagaagtactgtttgggatggcgatgggctatttgagtcagctggtctttaccggtgtggaaattgcgggccaattgatcgactttcaagtgggtttttcgatggcgcaagcctatgatccgacgttgcaaatcgcctcttcccagtatggcaaaacgtactattggctgacgatcgctgtgttttttggacttgatctgcatcatcgactgattacagcactgctgttgtcttttcggatcgtgcccttaggctctgtggtgatccaaggcacgacggttgaaggcatcgtcaaacttttcagccaaatgatggtgatggcagtcaatcttgcagcaccaatgatcattgcgctgctgttggtggacctcgtgctaggtgtgatttctcggtcgattccccagatcaatattttgatgatgagtctttcgatgaaaaccgccatcagttttgtggtgtttctcttgctattacccaatgtcctttcgtacttaggcaaacacttgccagatacggtccgctacttgcaggagtttatcaagtcttttcaataaagtaacaggcagccagcaggaggtgagaagatggcagaaaaagatggcaaaaccgaactacccagtgccaagcggctgcgggatgcccgcaaacgcggggaggtacctaagacccaggaattagcagctgctgtttcgctactggtcttctcgtttttgactctgtctttatggcagtttttcgccgcttcttttttgccttatttttcccgaagtttggcgcagctggctgattatcaaaccagtttggcggatctgccgaaactgggggtgcagagtatcttgctgctgcttttgttgtgtgcgcccgtctttctggtcgcgctcggagtcgggcttattacgaattatgcccaagtcggtctgttgttttcaggaaaggccgtcaaaccagactttaaaaagctgaaccctatcagcgggatcaagcagcaattcagtttgcgctcgttgatgaatttaggcaaaacattggcaaaattcggcgtgatcgtctacttgtgctatcaacaatttttagccgccgtccctgttttactgggtttgagtgaagtggggttggaaaaaacgatcctgttcatgctgctgcgggccaaagaattgttcttacagatctcgattttcttgatcattttggccgtagtcgactacggctaccaacgctatagccatcgcaagaacttgatgatgagcaaacaggaagtcaaagaagagttcaagcaaatggaaggtgatccgcaagtcaaagcacagcgcaaagcgaaataccgtgcgatgacccaaaatgccatcgccaacgtcaaagaagcgacggttttgatcaccaatccgacccatttcgccattgcgattcgttacgatgccagcagtgaaggggtgccacgggtcttggccaaaggggcagatcagctggcgcagcggatgaaagcagaagcactgaaagaaaatatcccacaaatcgaaaaccgtgaagtagcacgggccctttaccgtcaagtagaacccggggatctcatccctgttgaaatgtatgaagccattgctgaaatcatcgctttggtctatcagctagaagaaagccaacgcggcaagatttaaggaaacaggaggaactaaaatgaatgaggctgcctcaaaaccgaaaaaaggcattggtctggcggatatcttaatctcggtgatcgtcctagctattattggtttgattattattccattaccgagtgcattattagatattctgatcattatcaatttgacgatcgcgatcaacattttactgatcaccctgtttaccaaatcagtgttggaattcactacgtttccaaccttgctactgatcacaacgatgtttcgtttaggcttgaatctatcttccactcgtttgatcttgacccaaggaaatggcggacacgtgatcgatgccttcgccaatgtcgttgccggcagcaattacatcgtggggatcattttgttcgtaatcatcatggtggttcagctagtcgtcgtgaccaatggtgcagggcgtgtctccgaagtgactgctcgattcacattggatgcgatgcccggcaagcaaatggcgatcgattccgacctaaatgctggtttgatcacggaagcggatgcccgcaaacgacgaaaagatctgcagcgagaagctgatttctttggttcgatggatggtgccagcaagtttgtcaaaggggatgcgatcgcagggatcttaatcactgtcatcaatttagtcggcggagcgatcattttctccatggggggacaaatgaccgtcatggaagccttcgcccaattcgggaaactggcgatcggggatggcttggtcagctcgattccctctttactgatttcgattgcttccggggtaatcgtgactcgttccgataacgatagttcctttggtttggatattgcggcagatgtgatgcgtaatccccaactgtttcggatcgtgggggcgattctcttcgtcttagccttagttcccgggtttccttttgttccttttgtgttgattggtttaggccttttcgcagccagctttctggttacgcaaaaagaagaaaagcagcgagtggaacaaaaacaatgggaacaaaaattggcactagaacgcaaaaaagaagcgcaggaagaagatgattccgtggcttctttccaagtggaaccaatctcagtggaaatcggttatggtctaatccctatcgtggatagttcggtcgacaacagcttaatgaaccgcattgtggcgatccgtaaacagagtgccagagaattagggatcttagtcagtcccgttcgtattcgcgacaacctctatttggatgccaatgattacgtgatcaagattcgtggcaacgaagtcggccgcggcgatatttacccgaacaaagtcatggtgatcagcccgaatgaagagccgtttccttttcaaggaatcgcaacaaaagaaccagcctttcatctggatgcaatgtggatcgatgaatccgataaggagatggcggatctgcaagggtttacgattatcgagcctttgactgtgatcgcaacacacttaaaagaaatcatctatgcccatgcaccagagctgttaggtcgccaagaagtcaagaaattattggagggcatcaaagagcagtacaatgtcgtgatcgatgaattgatccccgatattttgcggctcggcgaggtccaaaaagttttacaaaatttattggatgaacaaattcctatcaatgacttagcaacgatcttagaaaccttagccgattacggcgttgtcacgaaagacgtagaagttttgacagaatatgtccgccaagcattgaaacggacgatcgctgccaagtatgccaatgaacgacacgagctgcaagtggcggtgatccagccgaaactagaagaaatcatcgctcaaagtatccaaaaaaccgcaactggctcgtacccggtcttaaaaccagataccgtgaccaagctgttggattccatcagtgggatccaacatgcggcgattgctcaaaatatcaatttcgtcattctggcatcgcctaagatccggttagcattcaaaaaaatgattgtttttaatttcccagatatcgccgttctttctctaaatgagattcccaatgaaattgcgatcgaaacggtgggcagtattgacatttaagcagaattttcttaggaaggggcatcgccgatgtatgaagtcgatcgagaagcggagatcatcaagtatctgccgctagtggaacgggtggttcagcgcctgtctatcaaaaccgccgattatgaatcaggtgatctctacaatattggggtgattgggctgatggatgccttgcggaaattcgatccctcaaaaaaagttccttttgaaagctatgcagtgattcgcatcaaaggggcaattattgatgaagtacgcaagcacgccaaaatctcccgttacaaaatggcggcagtcaatcagttttatcaagcacggcaagagttggagcaaagcctcaaaagagaagcgaccgatactgagatctgcaaacagctgggaatcaaccaaagtcaactagcggatatttatgagagtttgcactacttagccagcgtctctttggaagataccttgtttgcttaccaagaagaaggcatgacgataaaggatatggttcgggatcctgccgagaatgtcgaagataccttagtcgctgaagaaaaacgcaccgctttggttgcgtgcatcaaaaaattaggggaacgggaacaaataattttaagtctgtactataccgaagaactgacgttaaaagaaatcgctgaaatcttagaaatttcaattccgcgggtctcacaaattcacggcaaaacgattgccaaattgcgcacattgattgaggaggaactggcatgattcgaggattggatgtcttatcacggaacatttcattattacaaaagcgacaagagacgacgagcggcaatattgccaatgtcaatacaacagggtatcaagcaaaagccttgtttcagtcggcactagatgaagtggcgctgcataattatcaaagcgggcccaatgcggatactcgccgcgatatcggtgggttgtctttagggacgcaactggcaggtagtacgatcagccaagaccaaggcgccgtcaaacagacgggacaagccagcgattttgcactgctttccgaaggctactttgtcgttcaaaacaatgcgggtcagcggttgtatacgagaaatggcgactttaccgtcaatcagcagaatcaatacgtaacacaagaaggctatcttgtcttgggtgccaatggacaagcagtcagcgccttgggaccagcgaactttcagatccaatcatttcccccagaagcactgactacagatggtcaaaactacgtgactagcaacgcagcaggaaccaatgtgaatgcaccagtaatccagcaaggtgccttagaacaagccaatgtatccgttgccgatgaaatggtggcgatgatccagacttctcgggaatttgaagccaatcagaaagtcttgagttcaacgaatcagacattgcaaaaagcggtcaacgaattaggaaagatttgaggatgagtcaatgaatatcagtggattactaggaatcagccgttctgggttgaatcatttgcagacaaacttagacacgacagccaacaatatcgccaacgtcaataccaatggctaccaagcacaaacgacgcactttcaagcattgatggaaaatgccatcggtgcagaagaaacgctgtttaatggcaacaccgcccaatatggtgcgtcaatgggggcgaaggcaaccacgaccacaagttttgcccaaggcaatctggcgggcactgctcagccattagatctcgcaatccaaggcaatggctttttcggggttcgggaccaaaccggtcaattgctgctgagtcgagcaggcaattttcatttaagtgagaacaagcaattagtcaatagtgaagggtaccctgtggcaatgaccacaaacgtaccgacccctcagtggccggatgcgcagcaaatcgcaatagatgccagcggtcagttgacgacggaagaaaatggtcagactcgagtgttgggacagctgaccctttatcagccgacgaatacagaaaacatcacgccagtgggcaaccaactgtacagtgccggtgatcaagcgttgcttacttcgcaaaccaatccggcagcctttggcagcgtcttgcaaggacagttagtacagtcgacggtggatctagcgacttccatgacagacttgttaacgacccagcgtgcgtatggactgaatacgaaagccatgcagacagccgatgagatgtggtccgtgatcaatcgttttacagattagaggagaaagaacatgattcgcttaaccaaggtcagtaaaaaattcagcaatggcacgttggcattggccgatatttctgttgcgatccctcaaggagaatttatctatgtggtgggtcccagcggtgccggcaaatcaacgttattcaaattgctcttgaaagaagaagaactttcggccggttctatccaagtcggcaatgtcttgttggaacaactcaaagaccgtcatctctatatgattcggcgacaagtcggtatcgtcggacaagaagaccttttgcttccttatctgacggttgccaaaaacgtcgactatgcgctgcaagtactaggcactccccgcaagctgcgccaggaaaaaaccgccaaagcgctgcaactggttggcatgtttcctcaaaaggatcattatcccgaagagctttcagtgggacagcgcaaaaaagtagcaatcgcgcgagcgatcgtcacagatccagcagtcttgattgccgatgagcccaccgccaatctggatgcgaaatcagccgtcgaagttatgaaactgctcttgcggatcaatcaagtcggtgccacgatcctattggcgacccatgacagtacgatggtcaatacggtccgtaatcgggtagtcgagctgcaaaacggtcgtttggttcgtgatgaataccaaggcggctatactcgctttgctgatccaaaagatacatatgtctggtgaagatgcttaacttttctagcaaaagatccgattaaagaactagaagattgttttcataatcggataaagaaggagtgacccaacgattatcaagtgaagagcgaatcttgataaacagcacgactgatcattttgcataagaaaggatactgttatgaagaagaaggtacaagctatcatcaaaaaaatccgcttagcggtgttgattccgctaggatttaccctgatcgtattattaggatgctatttcttcgtgatccgcacccacggagacggacaagcagcaaaaagtttctttattttttcagtgatcgtactgctactagaaattgcagtgttagtaggaatgacctatctagcaaaaaaagagacccattcaggcatggatacgttgttggcagaactagaagcagtcggttctggcgatctatcccatatcgatgagatcggcagcagcgaccaaatctccctttttgggcaagttcaaaatcgttttcaaggggttttaaacaccttcaaagcggtgatcgttggcatgcatgaagaaagtagccggatggaaaaaatggtaggcggtctaacgacaacctcaaaaaatgccaaaaattcaattgaaaatgtgcgtcagacgatgaacgccatcgcagatgctactagttcacaagcctccgaagcggaacaaacctcctttgatatggacgaattagccttaagtatcgaagagatccacaaagagatcgaattgatgaacgggtatgtcggtcaatcccaaagcagtaatgtccacaattcagaaatgatgttccatgtgtttgaaagttgggagatcgaacggcaaaaccaagcagaattagtggaaagcatgaacgacatgaatgaagatgtccaaagtatcggaaaaattgttcagctgatcaatgatatttctgaccagaccaacttactggcattgaatgcatccatcgaagcagctcgggccggggaagcgggccgggggtttgccattgttgcagaagaagtccgcagtttagcggaacaaagcagtcaatcaacgaagagcattcgttcgatcattgaaacgatccgcaaaaaatcggaaaaagtggtctctgcagtgacggattcctttgaaagcggcgaaagacagaccaacaatattaacaaagccatcgagtccgctaatgagatctctgacattgtcgaaaaattggtttcaagtatccaaacagttgaatcccatattatcgggatcgttgaaaaaaaagacatggttcatgtttctgtcagcaatatttctgctgccgtttctgagacctctgctgggacgcaagaagtaaccgcaaacctagaggacttctacttggtcatcgaaaattttgaacagaatgtacaagaaattgagacaatcgctaatattcttaaattccaagtggatagtttcaaattctaaaaaggagcggtgacgctaatggaacaatacgttgtatttaaaagtcatcaacaacactttgccttgcggatcgattatgtggtaagggtcattgaggctgcctctttcacacagctgccagaagtggcggattttgttctgggtattcaacccattgaagaggcgatggttccgatcattgacatccgcaaaaagctgtttgatgaatttacgccggaaaccggacaaaatgtggtcttgttgtgtcactggcaagaacaggcgatcggtctttacgtggaagagatcgtcggcattctacccttagccgaaagtcccagcaatgcggaattaaatacgtcaggacttaagcaaaactatatcgaagcctttctgaaaaaagatgatgaacttgtactggcattagagctgccgtttctcttcagctatgaacaagcggcagagatgaaggatgagttaggcgcctatcagacagagaaattggcagccgccaatgacgatgacaatgatgaccgtgaatgaggaactgcatgtggggatctcggagtataagatcgcccaagcgccaactcgtttgatcacggtgggcttaggttcttgcatcggcacgatcatttacgacgaagccagtcatattggcggcttgagtcatattatgctgccagatagtcagccttttttgcacaagcgggaaatcaagcccgagaagtttgcggacttggcattgccggcgatggtcgccgagttgaaactaaagatccgccggcctcgctttcaagcgaaaatcgttggcggcgccaatatgtttcagttccagacccttaatgctgccagcaatattggtcagcgtaacattgaagccgtcgaggaagtcttggatcagctaaacattccgatcgtggccaaacatgtgggcggcagcgctggtcgaaccatggtcgtagaccttcaggatttcaaaaccatggttcggcaagtcaaacaagaaatcgtttatttgtaaaaggagtacagggatatgaaaaaagtaatgatcgtcgatgattcggcattcatgcggaaagtagtgacagatttattgaatcagttgccggatatcgaggtgaccgtcgctgcccgcaatggcaaacaagcattggattatttgaccaaagaagcgatcgatttggtggtaatggatgtggagatgccagtgatgaacggattagagaccttgcggaagatgaaacagcaatcagccattccggtcatcatgcttagctcattaaccaaccaagaaaccacgattgaggcgttagcgcttggcgcacgagattttgtcgaaaaaccagtcagtctatcgatgatcgaaaaagaatggatcgctgaatttcatcaaaagattttagcgatggatcatgaagccggcacagctcaagcactggtgccaacggctgcccaacccactaagctgacgcaaaacagcttgtcgtctcatcttgacgctctggtcattggcgcttcaacaggcggcccgcgtgccttactgggcattatccgtcgcttgcccgcgcatctgcgctgcccaattttgatcgttcaacatatgccagcgggatttacggcttcctttgcgaagcgattagacacagagacaaccgtccgagtacaagaagcaatcgacggcatgcggattgaaaatcaagtgtatctttgcccgggggattaccacatgacgatccaacaaggacatttgcaactggaccagcgagaaaaacggcatgggacgcgcccaaccgtcgattatcttttttcctcagcagccgattactatggtgcgcaactagcggcggtcgttttaacggggatggggaaagacggcaccgctggtttacgacagatccaaacggctgggggctatacgatcgttcaagacaaagaaacgtgtacagtttttgggatgccgcggtatgccattgaacaaggagtcgttgatgaagtcctgccattgcaggatattgaagcaaaaattgcacagatggtcgggtgaagaagatggaagaagaatttgccttatttaatgcatgggtggatcgccggttagggattccattagccgcatacaaagaaaatcaaatgcagcgccgcatccttacgatcatggaaaacagcggggcaaaaacgttgagggaataccagcaattgatcgaaggagatgaaggggtgcgggcagcttttttagcccatatcaccattaacgtaacggaattttaccgcaacaaagaactatttgacgcctttgaacgcatcttgaaaaccattgttctcccgaaaaccacgctgccaaaaatttggagtgccgcatgttcgattggggcagaaccctatacgatcgctatgctgctagaaaaaaaccaaattgctgcagccaatgtcttggccaccgatatcgatatgcaaattttggcaaaagccaagcaaggactctatcgagagcacgaattgcggaatgtctcagcggcagaacgtacccgtttttttgatgcaatagaaaagaaccagtttcagatcaagacagaaatcaaacggcgggttcattttaagcaacacgatcttttgaaagacccgtacaatggaccttttgatgtgatcgtttgtcgcaatgtgacgatctatttcaaaagtgacgctcgggatgccgtctatcaaaaattcagtgatgcattggtcccagggggcattttgtttacgggagcgacagaaacgatcaatttcgcggaacaattcggtctcaagaaaatcgattcgtttatctatcaaaaagtataattttgtaaaggagggacccatttggatgacaatagtgtctatcgtacccttttctttgaagaaacagacgatcatttagcacagttgaatgatcatgtcttgcaattggaaaacgatccacaagacagcgccttgctgaatgatattttccgttctgcccatacccttaaagggatggcggcaacgatgggctatgacgtcatgacgcagctgacccataaaatggaaaatatttttgagttgtttaaaacagggaccttgcaagtgacccagcaatcgatctcattgattttcaaatgtttggatcgcttgtcagaacttgtggaggatctgcgggaagaacgtgacctgcagccagctcaaattgccgatttattggccgaacttgaccaaacggaacattctggcggcctaccaaccgagacagaagcaagtcaaaaacctacagcagcgggcgcattaaacccacagtttcaacagatcgatccttctgatctgtacgtgatcgagcaagcggctggagatggctatcaagccgttcaaattgctgttcgcttagatgcccaatccatgttaaaaggcgctcgtgcctttttgatcatggaaaagcttggtcaaacaggggatgttctctatgcagaaccagatgcccaaacactcgaagaaggcacctttgaatcggatttctcgctgctgtatttgacacagcagacactagctgatgttgagcaaaacatcgccagcaatagtgagatcgaagccttcgtggtggcaccttttgatccatcagccgctgtgttggaagaggcagaagagctgcttcagccagcgtcggcccaagagtcagaaactcctgctctccaacaagcgaaaacagaaacgaaagaaaaatcaccggcgctagcacatcatgcgtctgcccaaaatcaatcaatccgagtcgacttgaatcgcttagattcattcttggatctcgtatccgaattggtggtctatcgcaatcaattagaagatgtcagtgagcgggaaaacatcgaagcagtcaaagaccccttagaacaagtttcacgattgacttctgagctgcaagatttggtcttgcggatccgcatgcagcaagtcaatgtcgtcttcagccgctttccaagaatggttagggacttatccaatgaactgcaaaaagaaatggaacttgtcatttttggggaagaaacggaattggataaaacagtggtttctgagttgagcgaacccctggtccatctgttgcgtaattctgccgatcacggcatcgaagcacccaacgttcgggaaaaactgggcaaacctcgcaagggcacgattcgtttggcggcctaccaagaaggtaatcgcgtgatcattacattagaggatgatggcaaaggccttgatccacaagtaatcaaagcaagtgctgaaaagaaaggcttagccacggcaggcctttccgatgaagcgttgcagcagctgatcttccaccccggtttttcaacagcccaagaagtgaccaatatttctgggcgcggtgtcgggatggatgccgtgcaatcgaagattacccaactagggggaactatcgagatgaagagtcagccgaataaaggcacgcagtttgtgatcaaattgccattgaccctgtcgatcattcaagcattgatggttcgcgtcggcgaagaaacctttgcgatcccattaaatctagtcgaacgcgtggtgatgatcaaagaagaagagatcattcagacggtctcagatgaggtctatcgttttcaagaagagttgattccgttgattcggaccgatcaactcttagcgatcgaaggcgacctatctgagaaaaaattcgcaattatcgtcaacaatgaccaacaatttcacggtattttggcagatgaattgatcggccaacaagagatcgtcatcaagaaaatcgatccgctgctgcaaaagctgaatcgctatcaaggagcaacgattatgggtaacggctcgatcgcactgatcttagacattcatgcgatctgtcagaaaaaaaaggatgaccgcttatgagttatacagcgctgcagatcgatggactaaaagaactgatcaatatcggcggtggccacgctgcgactagtttatcaaagctcctccaacaaccgatcgatatgcgggtaccggaagtcgagattctagcttatgaggatttgtatcagcagatcatggcggaagacaaagaagtacatgtggtgataagtcaaatcgaaggggcgtttcgggggatcttcttgtttgtcttaacggatgaatccgccgcaaaattgcgtcagttgatgatccaagaaagcgatccgtcagaagagttgaagcaatcagtcatcaatgagttgaccaacatcctcaccaattcttttttgatcgcgatcgggcaactgttggaaacacagctgagtgcgtctttaccaagtgccagctatgatttctttggcgcagcgatcagttccatctatttggcaatggcccagtatgatgagcaggtgatggtaatccgtaatgagttcgtctatgccaaagaaacattagaggcatcgttatttttgattccagaaatcggtgtactagaaaacatatttgattcattaggaatttgaaaggggcaaatacaatgtcaaaaaaagtattgatcgtggatgatgcggtatttatgcgcatgaaattaaaggatattttagaaaaaaacggctatgaagtcgtgggggaagcccaaaatggccaagaggcttttgaaaaataccaagcaacgacaccggacttagtgaccatggatatcacgatgccggaagtggacggcttagaggcgttaaaaatgatccgcacgtttgatgcgcaggcgaaagtcgtgatgtgcagtgccatgggacaacaaggaatggtgatggatgcaattcgcgccggtgcggtggactttatcgtgaagccctttgacacggaccgcgtaatcactgccattgataaagcctttgcctaatgcctaggaggatagcgacatgcagatgatacttttcaaaatggcccagcagtactatttgatttcggcggactcggtggacgaggtcattgatgctccttcctttacgaaggtgcccttagcacctgagtgggtagaagggttgatcaacctgcgggggtctgtcgtaacggtgattcgtttggcaaaactgattccgattatggaaccagcctacgaaaaaaatatattgatcatgaagaagcaagaggaaaccaaaggggtcctcgtagaagaagtaattgaagttcttgatatcaccgaagaggatatccaactagacaatcaagagacagaacatgccgttggagtcgtgacgatcggtgaaaaagtagccagtgtgattcaaatcgatcacatgattttttaaaaaaaatgggggattagtgtggatcaggtattgacgcagcaagagattgatttattgttgaatgcgatgagcagcggagagatcgatcaagaaattattgagatagaagacaaacaagccaaagtgaaagcctacgattttcgccgaccaacaaagctgtcgaaagagtacgtcaataccctgcacatgatcttcgaggatttctcgaagatgagcagcagcatgctttctacccaactgcggaccaatgtttctttgcagttggcagctatcgaacaagtcagttatgacgaatttatccattcgataccaaaatttactttattggggctctttcattcgcagcctttgagcgggatccagatgatcgagatgaacccacaactgtgcatgatgttggtagaattgttgtgcggcggtttagatgtttatcaaaacaagccgatcgaaatggattttagcgagaaaaaaagttttactgatattgaaacagcgatcttggaagaagtggtggcacaatttgtacgggtctaccaaaatgtttggaaggacatcgttgccttggattcggttttggatggaatcgatacgaatccgcaattgatgcaaaacatgtcgccgaacgaacccgtcgtattagtgacctttactatcaaaatttttgaagtgaaacatttcatcaatctatgtatcccgtacgtcttctttgaagggatcattgataaattaagtttccgcaattggtttgatagcaatcagccagtcaaccaagacgatagccgcgagttgcaaaaaagtttgaatggggtcggcttgaatttagaagttctgctgggccatgctcaaatgagtctttctgagtttctccacctagaagaaggcgatgtcatcaaactagacaaaaaaattactgaaccattagagaccttcatcgatggaaaaccttacttccgggcaaaacctgggaagcaagaggaccgtttagccattgagttattagacaagttagaagaggagcaaaaactatgagtgaacgtttatcccaagcagaaatcgatgcattgctgaatcaaagtgccccagcccagccgcaaggattagaagagcaagtcaaagtcgacattattggcgaagttggaaatatctccatgtcgcaagcggcgacgacgttgtcttccattcttgatcttcgggtcagtatcacgactcccagggtgtctaaaatcaaatttggtgagatcttaaacgacctcgttgcaccaaaagtagcaacgacagttgaatttaaagaaggccttttaggcagtaatttgatgctgttagaagtcaaagatgccatcgtgatcgctgatttgatgatggggggaactggtgaacccaccaacacccaatttacggaattagagctaagcgccgtggcagaagccatgaaccaaatgattgggactgcctcgacttcgatggcgacgatgatcagccgcaaagtggatatcttgccgccgatcgtcaaactatgggagacaccagaaaacattgagtatagcgggatcgaggcagaggaagagatttactgtatctcattttctttgcgcgtcgaaggtctgatcgaaagcaaaatcatgcagatctttacggatcctgtggtcaacgatatcgccagtgcgatgctgtccgatgaagcgactgtcgttactcgggaaacaccaacaccgcagccaacagcacccgttgctgcacctaagccagaaccagaggctgcatcaaagcccgtggaggtcagcaaaccggcatttcaaacattggcctccagcggagtgaacgatggggataatttggacttgatccttgatgtgccattggatctaagtgtcgtgttaggccgcagcaaaaaaaccattaaggacattttatctttcaatacgggctccgtcatcgagctggaaaaactgacggatgaaccgctagagattttgttgaacggcaaactgatcgccactggggaagtcgtggtcatcaatgagaacttcggcgtacggatcaccaacattctttcgcaaaaacaacgcattcacaatttgcattaacttgaagaaatcgcaaaaagttaaacatatgggtttaacttttttgtgatttgaccgatagtagagggtagaagaatgagaacggaggagaacctatgaaaatcgaaagaggttacgcagaatacagcgacaaggccatcaaacgcgatgcggtcaaacaagaaaagccaactgctcctcagacagaaaaaaccgtcgatgttcaattgtccgaaacagctcaagccattcaaaagagtgccaatcaaacagccagtcgcagtgagcgagtggcagaattgaaacgagcgatcaaagaaggcacctaccaagtatctgccgaaacgatcgccgataaaatgctgcagcaagatgaaaagcaggtcgactagatgacagagcgggaatttgagcgtcagcttcagcagttcttgcggttgctgcaaaaagaaaagacctgcttgatcaaaaatcaagcagaaaaattaccagaactcgtcgagaaaaaaaccgccttcgtacccgttttttccatgtatgaaggaactctttcagcggcgatcaaagaactcatccgccagatccaagtgcagcaagccgagaatctcctgctgacggaacaagccattagtttccaaaccgttttgatggatgcagtcaaagaaaatatcaagacaccagcaaatacgtattcgaaataccaagaaaaacaagctgtctcaacagcgatcatcgatcaaaaaatgtaaggagtacttctatgacaggactatttggttcattaggcaccgcaacccggggcatgaccgccaatcaagcagcgttgcaaaccagcagccacaacattgcaaataccaatacagacggctactcaagacaacgagtcaacttgcaagccgaagcgtcttatcatttagcgggcgtcggcagcatcggtatgggtgtgaaagtcggcagtgtcgaacggatcgtcgatgattttgtcattggacaagtacgcaatgccaattctacctatacatattacgaacaaaaagcagacatattaggacagctggaaagtttaatgaatgagccttctgacaatggactgtccaaacagctggcaacgatgtttgattcttggaccgcattagccaacaatcctgaactggatacgtctaagaccctcgtgctggaaaacagcagtacgtttgccgataccatcaaccaaatgggcaaacaaatgacgcagttgcaaagcgatacgctggataccatcgaaaaatccgcgctggacttcaatgagaaggtcaaacagctgcaatccttgaatgaacagatctatgggttgacgacgagtggtgaaacacccaatgatctcttagatcgtcgagacagtctgttgaaagatctctcgggtctagcagggatcgaaaccaagaccgatcaatatggccgtgggtttgtatccatgagtggacagacgattttaagtgctgaggaacgcaatacccttagtgtggtggtgggacaaagcgacacaggcgccttggtttccaaagacggcaacgccttgaatcctgctgaaaccattacaggatcttatccagctggaaccatcttgttgacgaaaaccaccgacaatggcgacaccgcctatacagaattgccgatcaaagaaggcgcgatcggcggcctgcaagcatcatctggtgagatcggcagccgcttgacggaattgaacaactttacgacgacgatcgcgcaagccatgaacatggtctttaccagcggcgcttctcgtactagcggtctatttgagatcggccaagatgatactggtacagccacgacgattcgggtcagccaagcactgttagataacccaagtctggtggccggcggaacgagcaatacagcaggagatggttcaagagccgctgcaatggcgaaactcagcagtgccaaattggatttcccattgtcagaaaagacgatcgcttcttttgatcctgagacattgacgtttgctaatgcagcatccgggatgagtgtcagcagctattttaacagtatcgttaccaaaaacgggatctcaaaacagcaagccgacaatacggtcagtgctcaattgtcactgctgaatcaactagaatacaaaaatcaatcggtgtccggggtttcattaaatgaagaaatgtcagatgtgattcgtttccaacaaggatttcaggccaatgcccgcatattatcggtcgtttctgaaatgttagacacattgatcaatcgaacaggagtgtagaccatgcgtatttccaattcaatcacctacaatgattttttacgaaatctaggaaccaacgcctccaaagtccaatccacgttgaatcagctatcgagcttgaaagaagtcagcaagtcctcggataatccactgctggtttcaaaaatcatggatcttaatgtgtcgttaaatcaaaacaaaacttacaacaatacgatcaaagacagtatttcttggacaaaagctcaagattctgctttagaaagtgttagtacctcgatgctgcggattcgctcgttggttcaatcttctgccaatgcaacagccggcagtgaggaattaggcgcaaatcgttcagagatcgagcaagagatcgaaggcatcgtggaatcattaaataccaactttgatggtcgctatctatttagcggaacgaatacgacgacggcgccttttgagatcgtcaaaaaaaatgacgccatcgtcggtatcaaatacaatggctctagcgaagacttgccccgagaaatcgcaaacggggtctcggtggatctgttagccagcggtgatcgtctgatgaacgagacgggtacagctgcggatccccaaaatttaagcacctacttcaatgatttattgtctgcgttgcgcagtgatgataaagatgcattagggggcgagcttttaaccgctcatgaccagcatgccactaatgtggtgaatgtacgggcgcagatcggcaccctctacaatcgcttggaggcagcagctgatcgaaacgagacggaaaagctgaacttgaccgaaacactgtccaacaaacaagacgtcgatattgcggaaaagtatatggaatatcaaaatcaaatgactgcctatcgttcaacactagcgatgggaacaaaaatcatgcagatgtccattctagattacttaaattaacccgaaaacttttgttctttgctgagagcaaaagttttttatttttttttagaaaaaaggcttaatcctgaatggtttcttccgataaatagtagcagagggaaaccttagcgaataaaaattaggaggaactacacatgagaatcaatacaaacgtttcagcattgaatacttactcacgcctaacggcagccaacgcttctaaaagcaattctttgtctaaattatcttcaggcttacgcatcaacaaagctggggacgatgcagctggcttagcaatttctgaaaaaatgaaaggccaaatcggcggtttgtcacaagcaaaaagcaacgcacaagatggtatctcattgatccaaacagcagaaggtgcattaaatgaaacccacagtatcttagggcgtatgcgtgatcttgcggtacaaagttcaaacggtacgttaagtgatgacgaccgcagtgcgatcaacaaagaatacaccgcattgtctgatgaaatcgaccgtatcaggaataacactgaattcaatacaaaaagcttgttaactggtgaaggcaatgatgcgaaatcattcactttccaaatcggtgccaacgcaaaccaaacaatgagcgtttcaatcaaaaacatgagctcaactgtcttggacgtaaaaggcttagatttaacacaagcattttccacaagcgaaattgctgcagcaaaagataaagcagtagcggctgccttcatagcagatacaacaacaaaatatgcagcggacggcaaagttgatgcggcagctggtcaaacagctgccgatttacaaacagccatcggtacagcagcggatgatgcagcagctcaaaaaacatacgatgatgctttagcaacatttaccgcttctgatgaaggcaaagcagcagcagcagcagcggaaactgccatcgttgaaaacaacccaatcacaaaaatcgataaagcgatcaaagtagtttctgcacaacgtgcggatcttggtgcggcgcaaaaccgtctagaacacacaatcaacaacttaggtacaacgcaagaaaacctatctgaagcaaactcacgtatccgtgacgttgatatggcgcaagaaatgatgagctttacgaagagcaacatcctttctcaagcagcaacttcaatgttggcacaagcaaactcaatgcctaatagtgtattaagcttgttacaaggataattttttgatcagaggaactactgacacaaggactgcctaggggaagcacagttcttgtgttttacatagcagcacaaaaacgcttagaaatgaggaagctctgatggatattcagccaatttcaggaatacacccgatcgaagccgttgcgtcggtcgctaagacacggccgattgaagccgtagatcaagaggccaccaaccttcgctcgcaaagcaaagggcgtggattaacagaggaaaaggaacggacagtggcaactgaaccgccgatccactatttttcagcagccgatcagcacaagatcggagtctccgtggatgaagtgaatcagctgctactgggcaaagatatgaaattggcttatgaagtgcatgagcgcacggggcggacgatggtgcgtttggtggatatgcagaccaacgaagtcatcaaagagatcccacccgccaacatgctagatgtgattggaaaaatatgggatgacatggggatcgcggtcgatcgaaagggatgaaaatatggcaagtgtaaccagcagttcaggaatcagtacaacgctagggagttattctggcgtgacttcagaagatattgaaaaattattggcggcagatgcgatcaataagacccgcgctgagaacaaaatcacgtcgcttaaagcacaaaaaacggcgtggagtgatatcagcactcgcctgacgaactttttgtcaaaagtcgatgcattacaaaaagatgatgcttatcaaacgaaaaaagcgacgaccaccaatagcagtatcgcttcaattgcaggaacaacggaagccccagaaggtacctatgatttaaaaatcaaccaactagcaacagccacgaaggtgacggggagtcaagtagctcaaagcagcaaaacagctctaaatgtcagtggtcagctgtcattgaccagttcggaagtagatgaaaatggcaaaccgatcaccgcttcgatcgagatcactgctgaagacagcttaaaagatgtggcagctaagattaatagccaaagcaagacgaccttcgttgcggcgagtatcgtggataaccgcttgattttaacgaataccaaaatgggcgacaaaaatttcttgatcgacggcaatgccgccgaagggttagggatcggttcaactgcgacaacgacgcaaggccaaccggctatttttgagctagacggcatgaagatcactcgcgacagtaacagtgtgacggatgttatcgatggtgtcactctgacattagctaaaaaaagcgaggagcatgtgacgctttctttagccaatgatacctcgaaagtcgttgatgcagtgcaaggattagtggatcaatacaatagcttgatgagttttatcgatgataatttgaccgtgggagatcctagtagtgaaaacaacaagacggggaccttggtgggagacagtgcgttgacccgtctacagactcaattgcgaaatttgatcaccattccagccgtcagcggctcaaagctgaccgctagtaagctaggcatctccaccgtcgataatgatggtacattgggactggatacgacaaagttaaaagaagccctagcggaagatcccgctgctgtgaagtccttcttttatgcaagtacgaaaatcaaagaagccgatggcactgcgagtacgaaagagaccggctatacactagcgctaaaagaattagccaacagctatgtcgtcaatacttcagccaataaagggatcattgccaccaaatctgcgacctatgacagtaccatcaaggatttaaacaagcagatcacacggtttgatgatatattagcaatgaaaaaagagcgttacatcacaatgttcaccaaattagactccgtgatgatggaggctgaaaatcagctgagttacctaagcaatcagtttgccaatacgtcaaactaggcaagatatacgattaaagcagtcattttttcattcgcataagaaaccctcgtcaacaagaaaggaaacaatctatggagccacacgtatcattagatgaacgtttgaatcagatcttaactagttttgcaaaatggcatggcgacagcgaagaagccggtcgtttgatggcagccaatgcagtggtcatagcagccatgcaggcagaagaacagagccatagtccccaaaccagtgtattggcgcaacaagtgatccaagcgtatcaagtgttcttagaccaggtcaaagcccagcagcaagagatcaaacaagaattaggacgtttgaaccgcaaaaataatcttgtcaaaacgtatttgcagcaagaagacaatgccgccttcgtcgaatttgatttatagtgaggataaaaagatgaattatcagaaaatgcaaaacaactacttaaagaatcaagtgatgagcgcgtcacctaacaaattgattgaaatgcttttgcaggcagcaatcaagaatatcaaattggctcagttagcgattgaaaaacaagaactagcaaaagcccatgaacacttcataaaaacgcaaaatattttgttggagttgcgtacgtcgttagacgaaaaacaaggcggcgaaattgctgaaggtcttgcagcattgtatgaatacatgtatcagcagctgattgaagccaacatcaaaaaagaagtggttcctgcccaagcggttgcagaactgctgagcgagttattagaaagttggcaggccattacccaatcagcttgatcaaatctaccgtttgcttgctgatagacgaaaagcaagtatgtattaagcatatatagagaaaaaaacaacgaagtgctgtttttagccgctcaaagtcgtaaacctcgcgtttgcggcttttttattgcgttgatgcacttcgtaattgtactttgtaaaaagttatagaaggtgtattttttttgaagctgaatttagctttcattaggggacgcttcaataagggggcgcttcattaaatttttacaatgatacccttttcaaaaaggcttattttttaccttatacgacaattctgttattctaaaaaataagaactgttttgcaaggaggtcatttagtgaaaaaagcagttttattcaagccgacagttctgcaattgctcgttattttctgtgtaagcctgctgctattgttgccgcaattgtttggccgtggcttgattttaggttcggatgccgtctttcattttaatcgtttttatgagacgagccagcaaatcaaagaggggaactatcaatactttctttccatttatgggtttcagcaatctggacggatcgtcaatgcattgtatggtccattttttgcgtattttcaagggatattggttttgatcagccgttcctggttccagtaccaacttttatcgaatgggttgctataccttttggcaggaacgtccatgtacacgttgctgcgaaaattaaaagtctcaggctggttgtctgtggggatgggcattctttttatgacgacgtattcgatccaatattgggtcgaacgacaaggcttttcggcttggggggcagcaatattgcctttttgtttcattccattgatcgatatgacgcgctttcaacggattcgtccctttgctgtaggggtatcagtggctgcgctgtttcaaatccatgttttttctagtattttattggttttgatctatattccgttctttttgcgcacttttttgaaaagccaagataaaaagcggctcttgctccatttaactgctgcaattggcatttttcttctgctgactgccaatatttggctggcaatgcttgatctttatcaaagcaatcaattgttaccaccttttgtgaatcaccatatggaacgaaatacgattacgggcaccagcagttattggtggacatccccctaccttttcccattggtctgtgggttgttttttgccggctctttgaagaaatggcaagagatatccaatggcttgaagctgatgactgtcgttgcgggcatttttttcctattatcgtctaactatttgccatggcagtggttatctagtctcgaaaacccattgatagaattgattcaatttccttttcgcttttttgtccctgcgacagtgctgattcttgcgggattgtgtcttttgcggccctatttagcggatagccgcctgaatcggccgatttggctgattttacttttagttgtcagtgtgggtcagatcatgttccaaaccagtaccaagatgagtgagtggcagtccagcgattccgcggtgaaaatcagaaatcactcctatctgtttgtttctgatcagcagacgctgaaagcggcttatttcagtccagacaaggccaaggcactggtgctgttccagcggtcaacccccgattatgttcccatctatcgtgacacaaaggaaaataaatacgatgcctatggggaacaaatcatcaagcaaaacacgacagtgcaaaaagcagtggttaatggacagttgattttgcgctggcaaggggacgattctagctggaaggcattaccggtcatcaattaccagcgaacgaccttacagcttaacggccagccattgacgcgttccgacatcagagtgagtacgataggggcagtgactgttaagcagcaggcaggtctcaatgagctgatcgtggattatgacgcgccttggtattttgactggggactgtgggtgacaatggctgcatgggttttattggctcttggttttctttggaaaaagcggcagctgtttgctgcagttagacgccaaaaataatcaagggaacaaatgccgacggccgctttccgacagcaaagaataatgaattggcttagaggccagagaagcaactgtagtgggcaacactccagcacttctctggcgtctaagtttttttaagaaaaatttttttggaattagttgcgcccgcaaccaattatctttatactgaacctactgtatttaccttacggcatttaaaggagaaaaattatggagtcgatcattcgttcaatcaatcatattgcccgtttagcctcattgtaccgagaaagagagctaaaaaaatatgggttaggtcccatgcatcatacgtacattctaaatgtctgtcgcaaccctgggatcagtcaagaagctttaggtcagttgatttttgtcaataaaagcaacgttgctcgccaattagcagtcttagaagaaaaagggtatgttcgtcggcaaacgagcagtttggatgggcggcgacagcttatttatccaactgaaaaagccttggcgatgcaacctatcctccaacaattgttgaagcagtggaatgagcaagccttagcagggttttctgaaacggaacagcaaaaattgctggcagatctgcaagtagtaaaagaaaactcgcagcgtgctttaaagaaagaagatgaggtccagtgaagctactaaaaaaatacttgcgcccatatattgggcgtatgtctctcggaatcagtatcaagttttttgggtctttgatggatctgctgttgccatggatcctagcctatatcattgatacgatcattcctacaaaaaatgtttccgccatattcttgtggggcggtgtgatgctgctgtgttcggtgattgctgttgtaaccaatattttggccaatcgtatggcttccagtgttgccagagatgctactggcagcatacgtcatgatctttttgccaaagtagcctatttatcgattcctcagatcgaacaagtcggtatcccttcactggtttcacggttgactacggatacttacaatattcatcaaacggtaggcatgatccagcggcttggcattcgagcaccgatcctcttactaggaggcgtattgatcacagctactttagatccagtgctaacagtcgtattagttggagttttgcccttcacattagttgccgctgttatcatttcgaagcgaggaatcccattgtttgcgcaattgcaaaagcgagtagacacactagttcgcaccgtccgggaaaatgtgacaggcgctcgtgtgatcaaagcattgtcgaaagcagaatatgaaaaacaacgatttcagcgagtcaatcagtcagttgttgcggcagaaacaaaggcgaaccgaacgatggctgccacaccacctttaatggattttttcctgaatgcgggtttgacattggtgattttagtgagtgcctatcgagtgaatgcggggctgacacagccaggggtgattattgcttttctcacctactttacgatcattctcaatgcaatgttaagcatcacgcggattttcgtgatcgtttcgaaaggattagcttccgcagaccgtattcaagcggtactgcgactaccagaagacatgaaggtcgttccccttctggcaagagaagatgaggcacacattgtatttgaccacgtttcctttacttatcctgatggtacgaccgtcctgaaggaaatcgatttttctctagacaaaggacagacgttagggatcatcggagctaccggcagtggcaaatcgacgattgtacgtttactgctgcgcttgtacgatccgaccaatggtcagatccgcattaatggccgtgatatccgctcactggatcctgcagagctgcaccaatattttggcattgttttgcaaaaagatgtccttttcgcagatacgatcgaaaaaaatattgattttgggcgccgcttttcaaaagaacaaatcgaagaagctgctgctagagcgcaagcaaaggaatttatccagcagttgccgcaacaattggcctatgaacttcatgcgcgaggaagtaatctaagcggtggtcaaaagcaacgagtcctcctatcccgtgcattagctggtgaaccacaaattttagtcctggatgattcagccagtgcattggattatcagacagacgccaaactacgccaagtacttaaacaacaatttgcggacacaacgacgattttgattgcacaacgaatcggttcgatccagcatgcagataagattcttgtgttggaaaatggccgcatgagtggattcggcgatcatgccacattactggcgacgaataccatctatcaggaaatctatcatggacagacaggaggaagaatcaatgcctagcaagacagtcgccgaaaaaccaaaagagacgaaaaaaactgtgaagcgtctctggcactatttgtatgaagcgaaatggcttcttctattatcagcagttttaatgatggctagcaatctgttttccttagtaggtccactgctttccggttatgccattgatgccatccagccaggtccaggaaaagttgtttttcaccgagtattcttttattgcggatggatgattgctttttatctttgttcagcggtgttaagttatctgatctcattattgatgatccgtctgagtcaacgtgtcgtccagtccatgcgcaaagcgattttcaacaaaatttctgaattgccgatcggctactttgatcgtatccaaacaggcgatatcattagtcgaatcagttatgatgtcgatacgatcaatacatcattagctagtgatgccatccaagtgctgagtagcttagtcaccattattggttcgtttattatgatgttgctgatctctccagtgctcgttttgatttttgtagtgacagtgcctgcctcggttctattgactcgttatttaatgaagaaatttcagccattatttcggcgtcgttcgcgaaagctaggggaattgaacggatttgtagaagaaattctttcgggtcagcaaacgattaagatctataaccaagaagaaccgatcattgaacgatttgatgaaaaaaatcaggccgcagtttcctcttattacaatgcagaatattatggcagcatgacgggaccgtccatcaactttatcaacaatgtttcgttgtcactgatcagtgtctttggcgcactgctatttttattcggtcgtctctctttaggaagcgtctcctccttcgtgttgtactctcgtaaattttctggaccgatcaatgagctggccaatatctttagcgatttgcaatccgcgttggcagcagcagaacggatctttcgcttgttggatgaagaaccggaagtctccgatgttcctgatgcctatgagtttacagaagtaaccgggcgtatccaattggatcatgtctcctttgggtatcaaaaggatcgcatgatcattaaggacctatcgctggacgttgccccaggcagtttagtcgctatcgttggtccaaccggggcaggtaagaccacgatcgtgaatctcttaatgcgtttttatgatccggatcaaggagtgattcgtttagatggacaggacatcaaaaaagcgacgcgcagcagcttgcgcaaaagctatgcgatggtgctgcaggatacttggttatttactggaactgtctttgaaaacctggcttacggtaaagcatccgcgactcttgctgaggtagaggcagcggccaaagcagcccatgtccatgagttcattcaacaattgccaaaagggtatgacacactgatcacagaagatggtggcgggatttcgcaaggacaaaagcagcttttgaccattgctcgtgcgatgcttttggatgcggatctcttgattttagatgaagccacatcaaatgtcgatacccagaccgatgggttgatccaaacggcaatgactgagctgatgaagggcaaaacgtcctttgtgatcgctcatcgtctctccactatccgtcacgcagatgtgattttagtggtccaaaacggtaatatcgtcgaacaagggactcatgatgaattattagctagagcaggtgcgtatgcagccctttaccaagcacagtttgatgaataagcaacgaatagcttgactcagaagaagcagcttagcagttggactaaagacccacgcatagtagcagaattggggcatccaacagatagttgcgtctatgtgcgccgaaaacttgctgaatcgcagaagtacacaatgacacggttcgcagtttgtagcaggccttttgtcgccgcctcttctttttcaatcaagcagtgacaaaattatgcagcgtttccatgacaaaccgcttttttatcggtatacttagaaaggaaacattctgaattattgaaagaaagaagggaacctgtgtgtttcataaacaattaaaagatttccccaaagatttcttatggggctctgcgtctgcagcgtaccaagtcgaaggggcttggcaagaagatgggaaaggcgcctctgtatgggatgattttgtgcgcattcctggaaaaacatttaaaggaaccaacggtgatgtcgcagtcgatcactatcatcgattcaaagaagatgtggcattgatgaaagaacaagggctgaaaacctaccgcttttctgttgcttggacacgaatttttccagaaggccgaggagaagtcaatcaagcgggactagatttctacttggctttgatcgatgaactgcttgctgcagggatcgaaccaatggttacgctctatcattgggacttgcctaaagcgttacaagaagcttacggtggttgggaatctcgccaaatcattgaagattttactaattatgctgcgacacttttcgaagcatttcgcggcaaagtcaaatactgggtcagtctgaatgaacaaaatgtgtttacctcactaggctatttattagctgctcatccgccaggtgtcactgatcctaaacgaatgtatgaagtgaatcatattgccaacttagctaatgcttctgtaatcaatacatttcatgagatggagattccgggtaaaatcggacctagctttgcttacacaccaaactatccgatcaacagtgatcccaaaaatattttggcagcagaaaatgccgaagatttgatggcacattattggatggatgtctacctatggggcgaatatccgatcgcagccatgaatttcttgaaagaacaggggatcgcgccaacgattgagccaggagacatggaactgttgcgttcggcaaaaccggatttcttagggatcaattactatcaaaccgccactaacgcagcaaatccgttagatggtgtaggcgctggtaaaatgaatacaactggagaaaaaggcagttcagaagaaacaggaacacccggtatgttcaaaaaagtcgaaaatccatttgttgatcgcaccaattgggattgggaaattgatcctcaagggttgcgagtggcgttacgccgtatcaccagccgctatcggatcccggtgatgatcactgaaaatggacttggcgaatatgacaagttgacagacaatcatcagattcatgatcaataccgcatcgattatctgtcaagccatgttcacgcaatcaaagaagcaatcagtgatggtgcagaggtgctaggttactgtacttggtcgtttactgatttattaagctggttgaatggctaccaaaaacgttatggtttcgtttatatcgatcaagacgaaaatcaagacggtagtttgacccgttataaaaaagacagcttctattggtatcaagaagtgatcaagaccaatggacaaaatagttaaatcatagcaaaacaaaaagtacgtttctaaaaggaagcgtactttttttgtagaatgaaaatcgttgacaaatgtaaacgatggaggtaaagtagaagagtagagattacagttgtaatcaaaaggtagcctctctcgcttatttggggaacccagtacgatatttcattaaggaggaataaacaatggctgaagggaactatgcaatcgaaggaatgacctgtgcctcttgtgcccagacggtcgagaaggctgtcagcaaagtcacaggtatcgaagaagcctccgtcaatttggcaacggaaaaacttcacgttcgctacgatgaaacgcaggtagatgaacaactcttagcaaaaacagtagccgatgccggctactctcttataggaaatcagctgcaagcaacattccagattgaaggaatgacctgtgcttcttgtgcccagacggttgaaaaagccgtgaacaaacttgcaggcgttcaagcggctactgtcaatttagccacagaaaaattgacagttcattatgacaaggaacaactaaacacggctgccatcgaagcagcggtgacgaaagcaggctatcaagctttcaccgaaaaaactgttgagatgcaatcggcaaagaaagaccccattcaaaagttatggcaacgattttggttgtctgccatttttaccgtgccattattttatttagcaatgggcgaaatgatcggtctgccgctcccttcctttttgaaccctatgacacagcctgtagcatttgttagtacacaattgatccttgtgcttcctgtcatgatctttggccacgctttttttagcaatggcttcaaagcattgttcaaagggcatcctaatatggactctctggttgctttaggcaccagtgcggcttttttatatagtttgtatggaacggtcatggtttatttaggagagacgcatttcgcgatgcatttatactatgagtcggctgcagtgatcctaacattaatcacactagggaaataccttgaatcggtatcaaaaggcaagacctctgaagccatcaagaaattattggatttagcaccaaaaactgctcggatcttaaaaaatgattcagagatcgaagtgccagtcgagcaagtcgtggctggcgatattgtgattgttcgtcccggtgaaaaaattcctgtggacggacaactgatagtaggacattcagcagtggatgagtcaatgatcactggagagagccttccggtggagaaacaacctggtgattcagttgttggagcgagtatcaataaaacgggtacgtttcgctatcaggcgacaaaagttggcaaggataccactttagcacagatcatccagctagtggaagatgcccaaggttcgaaagccccaattgcacgattagctgacaaagtttcgggtgtttttgttccgatcgtgattggcttagcgttactagcaggactggcatggtttttcttcggacaagagtcgtggatctttgcactgacgatcactatttcggtattagtcattgcctgcccctgtgccttaggattagcaacaccaacggcaatcatggtgggaactgggaaaggcgccgagaatggtgtattgatcaaaagcggtgatgcattagaaacgactcgcaacatcacaacgatcgtttttgacaaaaccgggacgatcacagaagggaaaccagttgtgacagatcttttaccttatggcgaacatacgaaagaaacggtcttgcagctagcagcttctgcagaagatggatcggagcatccactgggagaagctatcgtagccgctgccaaacaacagaaattaacattttcttcagttagtcatttccaagccgtccctggtcatggaatcacgggaagattggatggaaaagacgtgctgttaggaaacaaaaagttgatggatcaaaaacaaatagatgtctcatctgtaattgcttctgccgaaggcttagcaaaacaagggaaaacaccaatgtatgttgccatggacggcgcattgattgggttgattgctgtggccgatacggtgaaaacaagcagcgcacaagccattgaacgtctgcatcaaatgggcatcaaagtggcgatgatcacaggagataatgcgcgaacagcacaagccattgctgatcaagtagggatcgatgaagtcattagtgatgtgttgccagaagataaggcggctaaagtggcagaactgcagcaaactggacaaaaagttgccatggtaggtgatggaatcaatgatgcaccagctttagccaaagcagacgtcggtatcgccattggctcaggaacggatgtcgccattgaatctgcagatatcgtgttgatgcgtagtgacttgatggatgtgccgactgcagtggaattgagtcgagcaaccatcaagaatatcaaagaaaatcttttctgggcatttgcttataatgttttggggattcctgttgctatggggttattgcatctttttggcggaccgcttttgaatccgatgattgcaggggcagccatgagttttagttctgtttccgtcttattgaatgcgctacgtttaaaacggttcactccagtcagtaaacgagcagcaagaaactaataataaaatagagaagaaagaaggatcattatgaaaaaaacatatcaagtcgagggcatgaaatgcgaaggctgtgcaaaaacggtacgagaaacacttgctcgagttgccggcgttaccgaagttacagttgatttgaacaagaaaactgcgaccgtcataagcgatgccccagagcaagcattgacagctgcgttaaaagacacttcttatcgtttactttctatctgatgaacgtcgagaagagagatataaaaacaatagaccaataaataaaaacagtcaaagcgagcagtaagcaagactaatacacccaaaaaccgaaaaatctcctttctatcttttggttgttcttttgtctagttttactgcgccgctttggctgtttattaccgttgaacgtctaaataggaatatacccgcgtatcataacggttgcgactgcgggagtattcgatcggtgagccatttttttggtaaacgatttgttgaatttctaatactggatcggttggatcgcaagccagatatttctgatcatataacgagcttttatccgcagaaatcgtccgataagcaccgacaaattgaatgcctagttcttcttttacatactgatagatagaagtttccaagtgagaacgttttagattaggaactaaatggaccggcatgtacgtatgctctagaataaatggtctgccttctaaaattcgcagacggatgatcttatagacaggttgttcttctgtcaacatcagtttttcttgaatctctttgtccgggaaagctacttgaaaatcaatgacttcactggtcaattgccgctttgctttgcgcatttcagtggataagccgacatattccgttaatgtagtcgtatctcgatccacaaaaggatgattcaatattttagttccagctcctcgctgagaatagacgagcccttccatagagagaatcccgatcgcctttttgatggtcatacggcttacttgaaactcttcaacgagatctatttggttaggtaataaactatctggaggataggttttattcttgattctggttcttaaaatattggcaatttcttgatattttggcatctcctcacctcgcaaagagtatagctgaaaaaagcgatttcgacaatccgaatcggcagccttttttcaaaataaaagactgacaggttgatgggcctgccagtctttttgtcttaactgattgaagcttcttgttgacgatccagaatacgcaagaatggataccagatcataccgacaagtaccacgtcaatgacttgcagcaagccccctaaccaagaattggttgctaatacaccgctagcaatcactggcacggtccaaggcacagacacaccagttggtgctggaactagcccagcagccatcaccaagtaattgaaggttgttacaactaagggtgcgactacccaaggaatcaaaatcgtcgcattcaacacgatcggcattccaaaaatagcaggttcattgacattgaagataccaggagcaagagccaagcggccaacatcacggtattgctttttcttaaggacaaaagccatcaaaatcacaacagctagtgtcattccagaaccccctaaaccaaccgtgaaagtttccatgaatggtttcgtcacgatatggggtaatgcttcgccattttgataggcttctaaattatccaacatcaatgtgttccagataggatccatgacagagttgacaatgatttgcccatgaagaccaaagaaccataagaactgaaccaagaacagtgccaatagtgtagcaggtaagctgctgccaagacctgttaacggtttttgaatcaattcatagattacatcatgaaggttcgcatggaagacgccggtcatgatcgcattgatcatcaaaaagatggttagcgtaacgatcgctggaatcaaagcagcaaatgacttcgttactgcaggtggcaccccatcaggcattttgatttgccaaccgcgttttgtgacgcgacaataaatctcagcagctaagaaggcagcgatcattccgataaacatccctttggcgcctaatcggtcaagggaaagcacgctagttactgtttcgcctgattctgtagtcatgaaaaatggcgttagaatcaaaaagcttgcaaaagatacagcgccaccaaaaatcccttcaacatcataagacttagacaaataatagccgataccgaaagtaacaaaaactgtcatgatgctcattgttgcattttgtccattaccgaacagggtacttagagtgcctttcgttgcatcattgaaaaaaggcagattgttgataaccactacgattgaaccaaacatcgtaatgggaaaagaaagcatgaacgcatctcgtaatacagtgaggtagcggttttgccctaacgcattggctagcggcaagattttttcagatattttatccataaaaccgttcattaaaaatcactcctaacaactttttgcaatcgattacaattcataatgtatcatgttttattttaaatgtctatacattgtctaataaaaagattgatttttggtagtgcttcctttatgattacggtatcaagcatgaataaggagtgtaaaaaagatgacgtatcaatttccagaaggattctggtggggttctgctgccagcggtcctcagacagaaggaacttttccaggagacaaaaaaggacccagtatttgggattactggtatgagcaagaaccaggaaaattctttgaccgtgtaggccccgaaaaaacatcccaagtctataagcggtataaagaagatattcaactgatgaaagaaacaggacacaatacatttcggacatcgatccagtggagtcgcttgattccagcaggaactggcgaagttaatcaagaagctgtggctttttatcatgattatttcgatgaattgattgcaaatgggattgaacctttcgtcaacttgtatcattttgatatgccgatggccttgcaggaaaaaggcggttggttaagtcgtgagacagttgaggcttacgtcgtttttgccaaaacttgttttgaattgtttggtacaaaagtcaaaaagtggttcacgcataatgaaccaatcgttccgatagaaggtggctatctctatcagttccactatccaaacgaaatcaacatgaagcatgctgttcaagccggcttccatgaaaccttagcgagcgcgaaagcaatcaaggaatatcatgcgctagaattgggtggagagatagggattatcttgaatctgacacctagctatccgagagatgaagcaaacccggaggatgttaaagcagcccaaatcgccgatgccttcttcaaccgttcttttctggatccagcagttaaagggacatttcctgaagaattagtcacgatcatcaaagaattagacatgataccggaacatgaagcagaagatttagtgatcatccaagaaaatacgattgacttattaggcatcaattactatcagccacgtcgtattatggcaaaagaaacaccgatcgaccacacgaatggcccattaccagatgattattttgacaattatgataaacctgacaaaaaaatgaacccttatcgtggatgggaaatctatgaaaaagggatttatgatattttgaccaatacccgcgagaattatggcaatatcaaatgctatatttctgaaaatggtatgggcgtagaaggagaagaacgttttgtcaatgatgaaggaatcattgaggacgattatcgcatcgaattcgtcaaggaacatttgaaatatgtccaccaagcaatccaagaggggaccaattgtgttggctaccatatgtggacatgtatggataactggtcttggacgaatgcctacaagaatcgttatggcttcatttctgttgacttgaataatgatgccaagcgcactattaaaaaatctggccgttggtacaaagaagtttctgacaataacggcttttgattcaaaacacagtgaagattgcttcactgtgttttttttattgtcaaaaaatggtgctgtctatagcaaaagaataggactgtataatccatgctcagttttataaataaaaagactagacttacaaatgtaagcgtggtatcctatagaggaaatcggtttcactaaattataggatggtttttgaaaggagaaaaaaatgaataagtttatcgcgtttatggagaagcattttattcctattgcttccaaaatcggttcacaacgtcatctagttgcgattcgtgacggttttatcgtaacgatgccattgatgatcttgggatcttttggggtattgatcaataatttgcctattccagcttatattgattttatgaacggtatttttggtgaaggcacctggcaagcatttggcaataatttatctgcaggtacattttctattttagctttattgattgcattcacagtttcttataacttggccaagagctatgaccaagatgcattaggagcaggagcaatttcagttgccagcttttttgcattaggtgcaatggccacagatgctgatggtttgctgacagctgcgggtcttggttcacaaggattatttttggcattgatcgttgctattatttctactgagatcttccgtcgtttggcaggcaatcctcgtctagtgatcaacatgcctgatggtgtaccacctgcagtttctcgttcttttgcagcgttgttcccagcaatgatcactgtttcgatctttgcattgttcacagcaatcttccaagcattcggcgtatcaagtttggttctatctttctatgagcttgtgcaacaaccattcatgggattggcaaactcttatccagctgcattgctactagggttcatttctgctttcctttggttctttggtttgcatggtgcaaatatcatcgatccatttatgcaaacgattaacattccagctatcgaagcgaatacgaaagcgcttgaagcaggagacaaattgccgtatattgtaaataagccgttttttgattcatttgttaatataggtggtaccggtgcaacattaggcttattgatcgcaattttcttggttgctcgtcatcataaagcctatatgactgtagcgaaattatcattggctccaggggtatttatgatcaatgaaccagtgatgtttggattgccagtcgtgttgaatccaattttgttcatcccttatgttttgacaccacttgtattagtttcaactgcatattttgccacagcaacaggactggtaccagcatgtaccgttattgcgccttggacaacaccaccgatcattggtgggatcttgtcaacacaaagcattgctggcggaatcttagctgcagttaatttgattatctcgatcgtgatctatcttccattcgtgaagatggcacagatccaagaaaatcgtcgtctgaaagaaatctaaccgatcaaaattaggctgggacataagtcagaacaagacgaaactacccgaacgaatgaaaatgacaatcctgttgctttagttgctagttggtggctaaagcaacaggatgggtagtcgtctttgttgcttatgccgcagtcttttttaattaataggatgtgaggtgaatgttgtgccaaagtatgttgagatagcagatgtccttcgaaaaagaatcaaagatggaacttatcccaaagagagctttctgccgcatcaaacggagttagtaaaagaatttggtgtcagtcggatgaccattaagaatgccatcaatattttgatcatggagggactgttgctttcgaaacgaggatctgggacgaaagtgttgaaccattctttttgggatcgtgacacgtcttctgtaaacgaatacaaaggacttagttaccagatgaaaatgcaaaaaagagatttacaaagtcaggtaattaccttcgaagtctgtttcccagatagcagagtacaagagatgttgaaagtcgctgcggaagagccggtgtatcatgtgattcgtttgcgaatattagatgggcaaccttatattttggaacattcgtttatgccagtagatttagtgacgggattaacgaaagaaatcttgcatcgatcggtatatgattatttgttagaagagttgaattataagtttgccggtgcttatcgaacatttcaagcagcgaaaagtgatgagtatgatcgtcaatatttgaagtgtcaatcggatgatccagttttggaattagagcagattatttatttagaatcgggaagaccgatcgattattcaagaagccgaaatcggtatgatgttcgcgggtattccatgttagacatgaaaccagatcttttaaatcatcgaaaaccataacgaccaaagtgctcgctgctttggtttttttgtttttgatggccgaatggtttgttttcgtatagattctgagaatcaggtatactaatagtacgaagatagatacaagcagttttcaatgattgcttaaggagtgaagaaaagtatgaacctgctgtttgcgattgacgatacgtttgtagaacaattaaaaacaaccctctattcaatttggttgcacacatcggcaagccgattggatgcatttgttttacaagagaaggaacttgctcagacagagaaattgaatcaattttgtcatggactgggaattgtctaccatccagtcattatcggtacaggatctatttttaaacaagcccctgtcagtgatcgttatccagagtcgatctattaccggttattggcccaaaattatttgccgaaagatctagataaggtcttatatttagacgcagacatattgtgtatcaacgatttgcagccgctatatgaattaccgcttgaagatcatctttatgcggcagcaaaccattcaaaattaacagaggttacgacagtcatcaataaagtgcgtctcaaaaattatgagtctgaaggatatttcaattcgggcgttttgctgatgaatctgactcagttacgtcaagaagtaaaagaaaaagagattgcggcatttattcagaagaatcaattgaatttatttttaccggatcaagatattctaaatgggctgtatggggatcggatcttgggaattccagaccaactatataattatgatgtaagaaaaaaccgtacatatgaaacgatcagcctaggacactgggacttagactgggtcatcgatcatactgtattgctgcatttttgtggtaaagacaagccttggaagaaagggtacaagagccgttatggttcgctttataaatatgttgcccaacaacaaagcaagtatagcaggtcgttatcagacaactagagctgaaatcgaccaacgatctctttgagacgagcattacttttttgaaatgaaggtaggaatgataccataatattagaaactaaggcaaaagcagcaaaccgttgctagattcatttaaccgagtagcggaagaaaagtggagaacgaaagggagcgatagaaatgaaatttttgctttggcttgtttgtgtggtaggaatcgagattactgggattatttccagcttgttcgcgggtgatattgctgcgacgtatgcccaaatggacaaaccgtttttggcacctccaggagggattattggtatcgtttggacgattttatatgcctttatggggacagctttgtttttactcatcattgcgaaagtaaatccagcatttaagaaacaagcctatatcttctttggtatccagcaagtgttgaactttttgtggagtattgtcttttttggctggaatctttattgggtaggaacagtggttatcgtcttattggttttgacagtcatcgtctgtatgtttttatttgcccgaatcgataaaagatccacctatctttttgtaccttatctgatttggtgtctctatgcggggtatttaactatcggattaacactattaaatagttgatagtaacaaaaaacaagcgcagatttctgcgcttgttttttgttataaatattcttctgtcaactccatgaaggtatcgatatcttgtaagacccgatcgattccggcttgccagaaatcaggttttgtcagatcaacgcctaaatgtttttgggccaattcttccgtcggcatagaagctgtgtcttgtaacaaagcaatatattcttcttcaaaactcgtccctttttggttggcataagcatagattcccatgctgaaaagatagccaaatgtgtaaggaaagttatagaaaggaacatcatcaataaagaaatgtagttttgccgcccagaaatgtgggtgatagctagctaatccatcggcgtaactttctttttgtgcagccaccatcatttctgtgatttgttcagcagaaaccagccctttttgccgtgcttggtaaaaactgttttcaaaaataaagcgggcatggatattcatgaacatggcaatggcattttgcattttggcatctaacaaattgattttttcttcttttgtttttgcttctttcaatgttgcatcagcaacgattagttcggcaaaggtacttgcagtttcagccacattcatcgcataatcctgattaagctgcggcaagtcccaaagaacactactatggaaagcatgacctaactcatgcgccaaagtggctacctcattgacggaattactataagtcatgaaaatacgtgattctcttgtttcaggcagacttgtacaataaccgccaggacgtttgccaggacgatcttctgcttcgatccaacttttttcaaaggcttcttgcgcaaaatcagccattttgggactgaattttttaaagttttctaaaatgaaagcagctgcttcatcgaatgtataggtacgttccttcatttcacctaaaatgatcggagcatcttgatcctgccactccattttttcttttccgaataattgggcttttcgtgtcaaaaagtccacgatcggttgtttgttcttctggatcgttccccacattgcgtctaatgtcgctttttgcaggcgattatactcgagaggctccttcagatagtcatctacaccgtgcagtttgtaattggagagacggaatccatccagatgattcaatgtatcggcaaataaatcttctttttctccccaagctttttcccactccgcaaatagttgagcacgaacttcaggatctgggtcacccatcattttgttgaaagcttgaccagctgaaagagtaatcgttgttccatccgaccgggtaaatggaatcgcaatcgaagcaacaatcgtatcataatgctgactccaagcatttagtccgtctaaagaaagtgtgttaataatcgtttcttctgcttccgacaaaagctccttgccgtcgcgacgaatttcgctcaaacgaaaggcgatagtcgcaaagggttcttctttcaatagtgtctcccagtcttcatcagaaatttctgtcaattttttcgaaaaaactgtttcggctgcttgtagcattggtaatttggcatagagatcgcccgaaagtaattttgcctgattgtcattaacgttggcagatagcaatgcattgataaagctgctgcactgagaaaatcctttactgattgtttcggacaatgataataattcagctaattcctctggttgagaggcattgtcgggttgccacgcatctacttttgtgcgataagttttgatttgtgcatctagttgggacattcgttcttgcagttgggtagacgtgctgccgcctgaaaaaatcgaatcaaggtcccagttgagagaataagtcatcttgggtgttgctcctttcgtttatcagatggtaataagtatagcacacccttcgaaaagtagttgcagagaatactgaaaatggtaagattagaaaatgaggggctgagatgatgaaaaaaatgtggaaagaaccaaatttttatttcacgattgcggtagctgtgatggtgattttatttattagttcgtcacaaacttatgaacaacaatcacaagtcggtttgctttctcgcctgttaaaagaagagccattgaaagaatggttgagcaaattcgctttctcttatgcaggatctgaaatcagtattgccgaaaaaggttatttttcttttgtggaattttttattcgtaaaggggctcatttctttacttactttgtattaggaggtagcttatttctatcattgagctatcgaaaaattccctattggctgtcagctttctttggctggttggcagcaacagggtatgcagggatggatgagtaccatcaaatgttgaccggtggccgtacacctttgttccaagatgtcatgctcgattcagctggagcactgacagctgtcttacttagttgggggattcttagttggcaaaagcgaggcaagaaaagaaaataagattattttttaacagcaaccataactaaaatgcaatcaatcagctagaaatagtaaagtaaagatagaggcggaaaagatgcaagcagatcacagcagtaaaataaatgatccgaatagacgacaaccggatatcgtggtgcatgaaagtctaccagtaggagttgccttagcaatggcagggggattcttagacgcatatacttatctctttcatggagaagtgtttgccagtatgcaatcaggaaatgtcattttgttaggaatcaatttggcatctggagagtttggacaggctgccagatatttaccgccaattttgctgtttttgatagggatcatagtgactaatggcttgcagcatcgtttcccaacaggtggtagaattgtttggcaaaatgtagccctcttctttgaagcactcggtatttttcttttaggattttttgctcagacattgccaaatgtctttgtggattctggactttctttttttgcagccatccaatatgcttcttatcgcagattagctggaatgccctatgcaacgacgatgacgaccggaaatttgcgttcaatggcggattatctttatcagcgtttcttcaaaaaagatgctactgtagattataagatcaagtatatcgcgatgatcatcggaggatttttcttcggggcagtcagcagcagtttattaggtatgtttctttttcaccgaacgatttgggtcgtatcgggcatattactttttgtactgacgattacgatcagaaaccagaatcgggtataaaaaaggacggagaaataattctccgtcctttttggattatatagattaaataacgataacaggcgttcctacttctaccataccaaataattctttcatcacacctggcggagtattgacacatccgtgagacccgcgggtcttccataaatcaccaccatattctggttgccaatctgaatcatgaatcccaacgccggtccaatcaataggcatccagtagtcaacaggagaagaataatcttcgccggtcaatgtagcattccgctctttgttccaaacgtaaaatacacctgtaggagtgggtgatttaggttttccagaaatgatgtctgtttcaagagcgactgcaccgtctttgtaataccacatatgttgattttttaaatcaacttcgatataagtgtttccaaacagtggaccacttggatctgcactacccaagaccactggagaacgagtaaagtcttctccagtctttaaggcttcgatcaatgcacttgtttcagaatcagtttggatcgtccaacttagtgtcccagctggtacggatacctcgccttgtttcgtgcttttgaacgtagaagcattggtgcttgtgttgtattggttccctaaatctgctacataattccgtactttttcttcatcaatcgtggtttttccatctttataagagagccaatccatgattgttgcggtcggaatctggaaagttgagccattgatggaataattagcatttacttgagcaattttattcaatgattccatttcttttgctagttctttgtcatcagaagtaacgctaggtttcttttgatacgcagtcaaatccaattcactttcgccgctagtaattgctttttgtaaatccgtgacagtttgttcgacgtcaatggcatcaccaacaacttctggctcaatcgagaagccatcatctccttttttcaatgtggcatctttagaagcggtccgaccttcatttaaggtttctaaagcctctttgattgtggctgtttcacttgtcaacttttgttgatcaacagaaacggtacctagttttttatcttctgcagcagatacataggccattccccatgtccactggttttgttcatctttcaaatcttccaattcttttgtaaaatccgtttgcaaaccaaattgagccaaattgatggttttccaatccgtattgccttctttgattgtaaaagactgtttgctgtaacggtcatgcaacaaatcattggcttcagcgaccgttttattgctgatgtcaatatcatcgatcgaggtatttggcaagaaacggtcttgataatatgtacttcgataagcgtatccgcccgcaatcacgactagaacggcagcgatagcgatcagaacgatctttttcgtcttactctgagtatgtgtgtgtttgttggatcgtgtcatttaaaggctccttttatgatgatttaaaaatgatagatcggctaaatcataccatattctacaagaaaagcgaattgattaagtgaaagttccatgaaaaaatagagaattcttaaattataaaaagagtctgctcataggacagcaaccaagaagtgattcaacgaaagctgctgtgtgataaaagcacagcagctttacgcaatattctttggatcaaagtacacgaagcatcttgattcaaaggatctctttcttgttcggtcttatgttacagactcttgtaagtggcttatagcaatcgttttattgattgtcttccgcatctagtttcgcaaaagcttcatctagaatgtctttcaattgttttgcagaagcagtcattcgatcttgttctccatccgtcaatggaatttcgattactttttggattccttgggcattaatgatagcaggggcaccgatataaatatcttttaagccgtattcgccattcataaagacagaaagcggcagtactgcattttcatcatccaaaatggcacgagtaatacgagccaaggcaacagcgataccatagaaagtagcaccttttttctcaatgattgtgtaagctgcatcacgaacactgaagaacaagttaaccattgcttcttcatcaatatcggggttgtttttgacccattcataaatttgcaatccggcaacatttgcatgagaccaaactgggaattctgaatcgccatgttcccctaaaatataagcatggacattacgtgcatcaacatcgatcaactcagctaatgcttgacggaaacgagcagaatctagtgaagttcctgaaccgattacgcgctcttttggaaaacctgagaatttccatgttgagtaggtaagaatatctactggatttgcagcgacaaggaagataccgttaaatcctgaatcaacgatttgtgtaactacttcacgattgatttttaagtttttgtggactagatccaagcgagtttcgccaggtttttgtggcgcaccagctgtgatcaccacgacatcggcgtcatgtgcatctgcataagtggcagcatagatttttttgggtgaggtaaatgctaacgcatgagataagtcgatagcatctccttctgtttttgctgtatttatatcaatgatccctacttcttgagcaatattttgagtgactaacgcaaatgcataactggaaccaaccgcaccgtctccaacaaggattatcttttggtgatcttttttatttgtcttagcagtcatttgtgtatcattccttccgcatatttgttttactaggtaacatcctaacactttcaagcgattttgtcatgtgatttgctcaacaatgttacagataattttgctgtttcatttgtaaatgctttctttgttatcctgtaggaattaggataaatcagggtttctaatgatttttttaagaaagagaaattctgagcaaaggaaagacacggtaacagtccgttatgtgttataatcgtagtgaacgtttttactgggcagaattgtcgtgcccagtattttgtggtggtaatttttttgaaaaaatggagcggatcaaaaaatgaaaatgattataggtctgggaaatccaggcaaaaaatacgaaaaaacaaaacacaatgttgggtttatggtagtcgatgcgttagcggagaaataccaagctacttttaaatcatcagcttttgaagcagaaattgctgaattttttatgaacggtgaaaaaatcatgttggtcaaacctcagactttcatgaatgaatcgggccgggcagtagggcctttaatgacttattatggagtttatcctgaagagatcgtggttatctatgatgatcttgatttagcgttaggcaaaattcgtttgcggcaaaaaggcagtgcgggggggcataacgggatgaaaagcttgatttcccatcttggtacatctgtatttgatcgcatcaaagtagggatcgatcgaccacagccaggccggacagtggtcgatcacgttctaagtccttttgctaaagaagaccagccgatgattctgcaaagcttggataaagcagcagcagcaagtatcgattacttgaccaccggtgattttcttgccacaatgaatcgatttaattaaggaggacctgtatggatctgattgaactaataaataaggtgccgcaagtcgctgcctggcaccaacaattaacggatcacgcatctcgacagctattgactggcttagcaggttccgcaaaaacattagcttttgccggagcttatcagaaatttgatcggcaagtcattgttgttacaccaaatctttattataccaatcaagttgccgaagatttgcggaatattattgacgacgtgtatgtctttccggtggatgaagtgttgtcggccgaaatggcgtttgcttcaccagaagctcgagcggagcgagtgacagcattgaatgctgtcgctaccgggaaaaaaggaatttacgtcatgccgatcgctgcattgcggaaatatctgcctgctaaagatacttggctgaactaccaattttcttggcatgtgggggatgagatcaatttagatcagttgccgcagcaattggtattgatggggtatgagcggcaatcaatgattggcaaacctggtgaatttagtattcgtggaagcattttggatatttatcctttgaaagctgaatatccggtgcggatcgagcttttcgatgtggagatcgactcgatgcgctcttttgacgtggaaacacagcgttcagtagaaacgttgtcagaagtaacgattgttcccacaacagaattagtgttttcgccagctgatttagctcatggacaaaaagttctgcaagagttgctgaagaaacggctcgctgtagtgaaagagaccacagataaaaactttttagaagattattttggtcaattagcatcggcttggcaaagtggcatacctgacgagaatgctcgttattatgcggatcttttgtatcagcaaccgacgagcattttggattatttttcaaaagatgcactgctgatgatcgatgattatgctcgtattatggagacaaaccgcgagattgaacgagaagaagctgagtggcatacacaaaaaattgcagaacttcgcgttttttctgagcaatctttcgggcaagatgtccagcagctgattcaaaaagaacaattttctacaagtttcttctcgctttttcaaaaggggatgggaaatcttcgttttcaagcgatccacaattttcaatatcgaccaatgcaacaatttttcagccaaatgggtttgctgaaagttgaagtagatcgctgggagaaacaacaacaaacggttgtctttttagtaagtgattcagaacgagcaaaaaaattggaacaagattttcgtgatcactccatttacgcagtacaaaccacagcagatcgactttttacaggtcgaacgcaaatcgttgtagaaacactgcaaagcgggtttgaaatgccccaagataagttggtcattgtcacagaaaaggaaatcttccaaaaaatcaacaagaaacgtacgcggcgtcaaaatgtgaccaatgcggagcgattgaagagttacaatgaattaaaagccggcgactatgtcgtccatgcgaatcacgggattggtaaatacattggtatggaaacgctggaagtagatggtgtacaccaagactatatgaccatcctctaccaaaatgatgataagctgtttattccagttacccagttgaatctgattcaaaaatatgttgcctctgaatctaaaacgccaaagatcaataaattaggcggcagtgagtgggcgaaaacgaaacgaaaagtttcagcaaaaatcgaggacattgcagatgatctcattcttttatacgcaaaacgcgaatcggagaaaggttacgcgtttcagcctgatgatggctatcaaaaagaatttgaagatgcctttccttactctgagacagatgatcaattacgcagcactgcggagatcaaacgtgatatggaaaaagaaaaaccaatggatcgcttattagtcggagacgttggctttgggaagacagaagtggcattgcgggcggctttcaaggccatcaaagagagtaagcaagtagcctttctggtgccgacaacgattttagcacaacagcattatgaaacaatgctggatcgctttgaagggtttccagtcaatgtcggtttgttaagccgttttcgaacgaagaaacagcaaacggaaacgatcgagcaagtgaaaaagggccaaattgatattttagttggcacgcatcgcctgctgtctaaagatgtagagtttgcagatctgggattattggtgatcgatgaggaacagcgttttggcgtcaaacacaaagagcgcttgaaacaattacgctcgcaagtcgatgttcttacattgacggctaccccgattccccggacactgcatatgtccatgttgggggtgcgggatctttctgtgattgaaacgccaccggaaaatcgctatcctattcaaacttatgtgatggaaatgaatccaggtgcagttcgagaagctattttgcgggagatggcacggggaggacaagttttttatctctataatcgagtagatacgattgaacgtaaagtcgaagagctccaagcgttagttccagatgcgcgtattgggtatgcccatgggcagatgacagaaatccagctagaaaacacattgtttgattttatcgaaggacaatacgatgtgttggtgacaaccacgatcatcgaaactggggtcgacattccgaacgccaatacattatttgtagaaaatgcggattacatgggcttgtctactctttatcaattgcgaggtcgtgtcggtcgaagcaatcgtgttgcgtatgcttattttatgtacgaacagcaaaaaattttgaacgaagtcagtgaaaagcggctccaggcaatcaaagactttacggaattaggttccggatttaaaatcgcgatgcgtgatctttcgattcgaggtgcaggaaatctcttgggggcgcaacagcacggatttattgatgctgttgggtttgatatgtactctcaaatgctgtcagaatccgtagcgcgtaaacaagggaaaaatacacaagcggagaaaacaacggttgagatcgatcttggcatcgatgcttatctgccaacttcttatatagaagatgaacggcaaaaaattgaaatttataaacgcatccgtgaattggattctcaagaagcggtggatgagctgcaggatgatctgcttgatcgctttggagaatatccggtcgaagtggctcacctattaactgtcggagaaatcaaaatgaatggggatcgggcattgttagatacgatccgtaaacagcagcaaacagtgatcctaacgttaagtaaagttggcaccaaaaactattctgtcgaacagctgtttgaagcgttgaaagcgaccaagcttaaagcgacgatgggtgtcgatcacgagcagatgacgatcaaacttcagattcctgctgtgatgaaagaaagcacttggctgttagagattcaagattttgtcaaagcgctacgggaacaaaaatacgtgttacaagaaaattagttataaaggggcggagaagatgccaaagtcacaattaaaacggacgatggaaggagcatttattttaacgattgcttctttcattgccaaagtgttaagtgcggtttaccgcgtccctttccaaaacttagttggtgacgaagggttttacgtctatcagcaagtctatccaatctatggattagctatgacattggctttatctgggttgccgcaatttatttcgcgcgtgatcgccgaacaacctgatcctcagaagcagcgtgcccagatccaagtcatctatccgtatgttttttggacagcgattggactatgggcaacgacgtttttctttgccgatgttatcgctcgggtcatgggagacgcaggactggcatctttgatccgcgtggtatcctttacattcctctttgtaccacccctgactttttatcgtgggagtttccaaggaaatttacagatggtaccgacggcagtttcccaagtagtagaacagctccttcgagtcggagtgattttagtagcggccagtttttttcatctcttctcatgggatgtttatcagactgggactttggcaatgtccggcgcattgattggcggacttgcggcgtgggggattttaagctattatagtcggaaaatcaccggtcggtcgttagcgatccccacaaaaactatgcctaccgcacatgctccttccttgcgtcgccgttttttgattgaagggggactgttgaccatttacagcggttttttgattttgtttcagttggcagattcctttttgatgacgaactcacttgaagccagcggtttgacggaacaaagtgcccgcattgcaaaagggatctatgaccgaggacagccattggttcagttaggtctcgtggtagcgatggctctaagttcgactttcttgccaacattgacgaaatatctgacagtcaaaaatcagcacttgtttgaaaaatcagctaagatgtacttgcggttgactttagggattgccagtgcttctgcagttggcttggctatcctgcttccttatatcaacttcgctctttttaaagatggtgccggcaacagtgcgttggtcttatttgtttttgcggtcgctttgatggctgcaatccaagcgtatcaaagcatccaacaaagccggaaccaattccgtgtagggatttatgcagcaggatgcggccttttgcttaaaggtttgctgacgtggcccttgacctatcttttaggaacaactggtgcgagtttgagtacccttttaggtttgatcggtactttaatctattttgtgttttctgagaaaaaagcattgaacagcttttggatagagcaagggtatggcaaaaaactcctgctttgtttagggatcatggcttgcgcactgtttttatattatggtgtgatcactctgttgagtggaggtccagtgacgaaaagactgcaagcgctgattttttgccttggaggggtcttttttggcgggacagttttcattataatggctctcaaagttaaattattaacgattcgagaatggctgctcgttccgtttggaaaaaaattgttgaaattaagaggtggaaaaaatgagattagataaatttttaaaaatatcccggattatcaaacgtagatctgttgcaaaagaagtagcagataaagggcgtatccaaatcaatggaaaattggcaaaatccagcagtgatatcaaagtcggcgatacggtgcgtattcagtttggaaataaagtattagaaataaaagtacaagaattacacgaatcaactaaaaaagaagatgcagctaaaatgtacgagatcctcaaagaagaacgtatctcagaaaatgcttgatttttgtcccattttcagttagacaacttttgtggatgttggtataatggaaaaaacaatcacagtgacaggagcgaggtcagcatggataaagagccaaacaaacaaatagaactattgcagaccgagtatgccaaagagcaatttgccaagttcgaaaaagaacgacgacaagtggtctttcgtcgacgtcgacttgtagctgtttttgttgcagcgctagtgatttttgcaatcgtaggtattcaaatgttcaatgatcaaatgcgtctgcaaaaattacaagagtataaagcagaaacagtagcaaaacaagaagcagcggacaaaaaagtgacacaacttaagcgagatgtagcactgttgcaagatgacgaatacgttgcaaaattagctcgcagtagattcttttattcaaagaaaaatgaaaagatctaccctgtcttgccggatgcttctgattcaaaaacagaaacaagcggtgatgaggcaaatgctagtgatacaaagacaagtgattcggaataaacaaggtcatacctactcatcgcagtagttgaaatgattaaatgggtaaaaattaggaggaacattttttatatgtcaatcgaagttggagcgaaactaaagggcaaagtgtctggtattacaaattttggtgcgttcattgatcttggtgaggggaaaactggtttggtacatatcagcgaagtatcaaatgggtttgtgaaagacattcatgacgtgttgtctattggcgatgaagtaaccgttgttgtgacggcaatcggcaatgatggaaaaatcgggctatcgatccgtaaagcagaagcaaagccggaagaaaaacgtgattttcctaaaaaagaattcaatcggtcaagtccgaagaaatctttttcacgcaatcaaccgacgaacgtaaataaacaagacttcgattcattgatgagttcttttctaaaagatagtgatgatcgtttatcttcattacgacgtaatacggaaggtaaacgcggcggccgtggcggtcgacgtaactaaacaggatgagcaagttgtcaaaagaatttgtgacgtaacgataagtatttcaaaaaatatccgaactatatccgattactcctaccatgtagtaggctttcgccgtggagcacggcgttttggaatcggcatagttcggatatttctctttcttagcaatagacagtcatttttagtttgaagttaagtatagaagcaagagacacggagggatagaatgcttaagcaaaaagtctatcatgcaatcaaagccgatggatgggtagaggatgctacttgtttgcttgctgtttcgacaggcgtggattcaatggttttactccatgtgatcgaagagttgtttcagcaaggaacatttggcgtggctcatgtcaatcataatctgcgggaagcttcagacgacgaagcagcgttcctgaaggactattgtcaaacgcgcgggattccatattatgaacgagtttggcaagatccgccccaaaatggcatcgaagcggccgctagagagttccgctatcatttttttgcagaaacgatgactcttcagagttatgattggttattaaccgctcatcatgcagatgaccagatggaaacgatgctgatgaagatggtgcgagagggacgcttgcaaaacgcttcgggaatcaagcgcaagcaaccttttggtaacggttatttgatccgtcccttcctaacgatcgccaaagaggagattagagactatgcaagaaggagagggatcgcttatttcgaagatgaaacgaatcagcaaacgctgtttcaaagaaatcgcctgcgtcatcaagcggtccctctgctgaaagcagagaacccgagagctcttgatcattttcagcagctttctcaagagatgatctatgctgaccaattgatcaaaaagcagcaagcagattggctcgccacgatacttcatgaggaagctgaaggctattttttaaacttggatgaattggctgcgtttaccgcagcagaacgctattacttttttgaaggtttgctacagaaagtttcccatgataaaggaatctcgtacaatactaaacaacgagagcagttgctgtatctactagaacataatcccagtcagtggataatcgatttaaatcaagattggcagattgttcgagtttatgatcagttgaaagtcactgctgttaaaaaaggctctcacctccaaacgcaggtagatgagacgcattttgttctaaaaaaaggtgaaagtttctttttgtcggaccatgaatggatcggctacattccaagtgacgcccaagttccagaaaaagtcatggattggtcagagatttcacaaattttaccgatacaatatcctgcgacagtttttttgcggaagcgaaaaccaggggatcggttacagctgaaaccaggtcttacgaaaaaaatcaggcgtttctttatcgatgagaagatttcgaatgaaaagcgtgctgctagttgggtcctgacagacgctcaagagaatgtattggcacttttgccttatctattttcctatttgagtattgagcaagaaactgataaaatacactacatacttctttataaatatcggaagtaagagttggaaggagaactttatgttagacaaagatattgaaaaaattttgattactcgagaagagatccaaaatcgttgttctgaactaggtaaagaactgacggaaatctacaaagataaaaatccattggtcgttggcgtattaaaaggagctgttccttttatggcagacatcgtccgagaaatggactgtcatttggaattggactttatggatgtttctagttatggaaacgcgacaatttcttctggcgaagtgaagattttgaaagatttggatacaaatgtcgaaggccgagatatgctgatcgtagaagatattattgatagcggtcgcacattagcctatctagtagacctatttaaatatcgcaaagcaaagtcggttaaaatcgtgacattgctagacaaaccagaaggacgtgtggtgaaaatcgatgccgactatattggctttgatgtaccgaacgaatttgtggtcggctatggattggattacgcggaacaataccgtaacctcccttatgtgggtgtcttaaaaccaagcgtttatcaatcaaattagtgactgatctaaatcagttgtgatacaattaaatggtcaggattgataaaacaaaatagccaaggaggtacgcatgaataagaaaaataacggtatgatcaaaaataccttatattatgtacttgtcttgttagcaatggtcatggtcgtctatttcatttttggaaatggcaatcagcaaacgccaacaatcgagtactcaacatttacggagcagctgaaagacggaaaggtcaaacagtttaccgttcagcctgctaacggtgtttaccggatcgtcggtgaatacaatgccgaacaaaccgtcagcaatgacaatgggctttccgtactaggaagcacgcaagcaagtacgacacgttttacaacgatcattttgccgaatgactcgacattgagcgaggttacgacattagcaaaggatcaaggggttaaaacaacgatcgaagaagaatcgaacagtggtgtttggttatcgttgctgattagtttcttgccaatcgtaatcatcattttcttcttctatatgatgatgagccagcaaggcggcggtggcggcggtggcggccgtgtcatgaactttggaaaatccaaagcgaaagaggccgacaaaaaagccaatcgcgttcgtttctctgatgtagcgggtgctgaagaagagaaacaagaattagtcgaagtggtcgaatttttgaaagatccacgacgctttgtcgaattaggtgcgagaatcccagctggtgtgctgctagaaggacctccagggacagggaaaacattgctagcaaaagcggttgccggagaagctggcgttccgttttactctatctcaggctcagactttgtggaaatgtttgtcggggtcggagcgagccgtgtccgggatctatttgaaacagccaagaaaaacgcaccggccatcatctttatcgatgaaatcgatgcggttgggcgccaacgtggtgccggcatgggtggtggacatgatgaacgtgagcaaacgttgaatcagttattagttgaaatggatggatttgatggcaatgaaggagttattgttattgcagcaaccaaccgttccgacgtgttagacccagccttgttacgtccaggtcgttttgaccgacaaattcttgttggccgtccggatgttaaaggccgtgaagctattttacgagttcacgcacggaacaaaccgttgtcggatgatgtggatttgaaagtcgtagcacaacaaacacctggttttgccggtgctgatttagagaatgtcttaaatgaagctgcgctagtcgctgctcgtcgcaataaaaagaaaatcgatgcctctgatattgatgaagcagaagatcgggtaatcgcaggacctgcgaagaaagatcgtgtcatcaataaaaaagaacgcgaaatggttgcttaccatgaagcgggtcatacgatcgtcggtttagtcttaagccgtgcgcgggtcgttcacaaagtaacgatcatccctcggggccgtgctggcggttacatgatcgcattacctaaagaagatcaattcttaatgacgaaagaagatatgtttgaacaaatcgtcggattgcttggtggacggacagcagaagaaatcattttcggcgttcaatcaaccggagcatccaatgactttgaacaagcaacagctttagctagaagtatggtcacagaatatggtatgagcgacaaactaggtccagttcagtatgaaggcaatcatcaggtcttcgtcggtcgtgattatggtcaaaccaaagcttactcagaacaagttgctttcgagatcgatcaggaagtacgccgtatcttgatggaggcacatcaaaaagcacatgagatcatcgaagaacatcgtgcgcaacataaattgattgccgaaaaactgcttgaatatgaaacattggatgcaaaagcaatcaagtcattgtttgaagaaggcaaaatgcctgctggaactgagaattcagaatatccaagcgaaaaagctcaaacttttgaagaagcaaaacgcgctttagaagagaaagatgctgaaaagcaagctgctgagaaaaaagattttgatcagcaagtagacgaacttcgtcacaataatgaaaaccacgaagcttcatctcaagataaaacagaggacggtcaagagtagtcgttcaattatcaataggtgattagctatcgtaaagtctagggactgtgtcataagtcaaaacaagagaacagattcgaatgaggttcggaccagttgcttgttttacggcttgtgccgcagtcctttcttgttaacaaatcgagaaataaaccgacagaaaacattggcttttctctaaaatggtggcattcagttgaaaaaaaaacaagttcctagtatgattcactaatgaacgaaataaaggagcataaacaatggaagattacttagtaaaagcattagcttatgatggttttgttcgtgcctatgcagtgtctgcaacaaaaactgttagtgaagcacaacaacgtcatgatacttggaatacagcatcagcagcgctaggccgcgctatggttggaagcctgcttttgggcagcacgttaaagggtgatgacaaattaacggtcaaaatccaagggaacggacccgctggagcaatcattattgatagcaatggtcgtggagatgtcaaagggtacataaaaaatccgcatgtcagcttgccgctaaacggacaaggaaagttggatgtgcgaggagcagtaggagatcaaggaatctttactgtaatcaaagatttagggttgaaagaaccgttttctggacaaacacctattgtctctggagaattgggagaagacttcacttattacttagcagtttctgaacaaatcccttcggccgttggattgagtgtgttagttgataccgatgattctattcgaacagccggtggtttcttactgcagatcatgccgggagcagatgaaacggttattgattcaatcgagaaccgcctgcaagaattaccacgagtgtcatcattgctggatgaagggaaatcgcctgaagaaattttgacggtattgttgaatgacaccaaagtcgaagtgttagaaaaaatgcctgttcaatttcgatgtgattgtagcaaagaaaaatttgcgacagcgatcattacattaggcgcggatgaaatacaagaaatgatggatgaagatcatggtgcagaagctgtttgttcattctgcggtaataaataccatttcgatgaacaagaacttgctagattaaagaaagaagctgaggcatagaagatggcgatacacagctggaaaatcggtaatgtcgaaatccctaatcgagttgtcgttgcgcctatggcaggaataaccaatgcggcgtttcgcgtaacggtcaaagaatttggcgcaggcttagtcgtttgtgaaatgatcagtgatcggggaatccaactacgaaacaaaaaaacattagaaatgctttatatagatgaaacagaacatcctttaagcttgcaaatttttggtgggaataaagagtctttggtcgaagcggctcaatttgtctcagaaaatacagcagcagatatcattgacatcaatatgggttgtccggtaaataaaattattaaagcggaggctggtgcaaagtggctattggatccagacaaagtctacgaaatggtgcatgcagtagctacggcaattgataaaccggtcacagtcaaaatgcggatcggttgggatgatgaacatattttcgctgtccaaaatgcgcaagctgctgaagcggcaggtgcagcggcgattgggatgcatggccgcacgagggtccaaatgtatgaaggagcggctaattggtcggtattaagagaggtgaagcaagcaatttcgatcccttttatggggaacggagatgttcggacaccagaagatgccaaacgaatgctggaagaagtcggcgcagatgctgtcatgatcggacgagcagcattggggaatccgtggatgatccatcgtacaaaacattatcttgaaacgggagagctgatcgccgaacctactccacgggagaagatcgctacagccaaacttcatttggaaaggcttgctgatttaaaaggtgaatttgttgcttcccgagagtttcggcagcatgctgcctactatttaaaaggcatttcacgggcagctaaagtcaaagcggcaatcaaccagacagagaataagcaagcgattattgatctgttagatgcatttgtagaaaagacagaaaaacaacctgtcggaaatactcctgagtaaagtaaaatcaagtcgatcttgaacttcggcttgattttttgtggcatcattggcattataagaaggaaacccaagttaagaatggaggaaaactcgtgacagaggaacgacaaaaacaagaagaattaaatgatcaaatgttggttcgccgtgaaaagatggaaaaattacgggaagaaggcattgatccctttggcaagcgctttgaacgtacgcataattctgccgagttgcatgagttatttgatcaacgaacaaaagaagagttaacagagatgaatctttctgcaagtgttgctggacgaatggtgacgaaacgtggtaaagggaaagctggctttgcacatttgcaagatcgtgatggtcagattcaaatttatgtccgcaaagatcaagtaggtgacgaaccgtatgaaggatttaagcatgctgacttaggtgatttctttggtgtctcaggggagatcatgaaaactgatacgggggaagtaacgatcaaagcaaaagaaatcgttattttgtctaaagcgttacgcccactcccggacaaataccatggacttaccaacatcgagcaacgttaccgtcaacgttatctggatttgatcagtaataaagatagctttgaccgattcatgaaacgcagccagatcatcagtgagattcgtcgctatttggatggtcatggctacattgaagtggaaacgcctgttttgcataatcaagcgggtggggcagcagctcgtccatttatcactcatcacaatgcgttagatattgatctatacttgcgaatcgcgcttgagttgcacttgaaacgattgatcgtaggtggtatggagaaagtctacgaaatcggccgggtcttccgtaatgaggggattgatactacccataatccagaatttactatgttagaagcttatacagcctatacagatttcaaagatgttatggatctaactgagggaattatccgcaatgcagcagagaaagttttagattctgctgtgattacttatgatggacaagaagtcgacttggcgagtgattttgcccgcgtgcatatggtcgatgctatcaaacaacaaacgggtgtcgatttttggaaagagatgacaatcgaagaagcacatgctttagcaaaagaacaccaagtggaagtcactccaacgatgacagtaggacatgttatcaatgaattctttgaaacgtttgttgaagaaaccttacagcaaccgacctttgtttatggacatccggtagaagtctcacctctagcgaagaagaatccaaaggaccctcgatttacagatcgttttgaactatttatcgtaggccgggagtttgctaatgcttttaccgaattaaatgatccaattgatcaaagacaacggtttgaagcacaagaaaaagaacgacaagaaggaaacgatgaagctcatggagtcgatgaagacttccttgaagcgctagaatacggcatgccgccaaccggtggtttagggatcgggatcgatcgtctagtcatgctgttgacagatgcacaatcgattcgcgatgtgctgttattcccaacaatgcgttgataattcataaagagagacacacgggtgtttacttgtgtgtttctttttttaccagtagttccctccaaaatgactaacaagaaaaaaacaagggagaaactcactgctaaatggaacgaaaacgaattaaaaacgaacgatgaattcattggattgtaagaatgaacgcctttgagaaattacgaaaataagagagaaagttattgacctgacagcatttagttggtatattattacatgtgccaaatgacaaaaatcatttctaaaagaaaatgaaaaaagttattgacgccagaaccaacagatgatattataacgaagtcacaaatttaagaaatcaatttgatgctgatgcagcaacaaaaaagattgaaaaaagttgttgacaaataacaattaatttgttattctaatgaagtcgctgatgacgcacaggaagttgttgaataaacactttcgaaaaaaacttttaaaaaaagagttgacattcacttgttgatctgatatgatttaaaagttgctaacgcagcgcagtagacctttgaaaactgaacaaagcaagcaaacgaaccaatgtgtagggcgcttcatttatgaagcaaaatacatgcaagcaatagctagcaaagttaattttatttgagcttaacgatcctatggatcgttcaaacaaatcattatgagagtttgatcctggctcaggacgaacgctggcggcgtgcctaatacatgcaagtcgaacgctttttctttcaccggagcttgctccaccgaaagaaaaagagtggcgaacgggtgagtaacacgtgggtaacctgcccatcagaaggggataacacttggaaacaggtgctaataccgtataacactattttccgcatggaagaaagttgaaaggcgcttttgcgtcactgatggatggacccgcggtgcattagctagttggtgaggtaacggctcaccaaggccacgatgcatagccgacctgagagggtgatcggccacactgggactgagacacggcccagactcctacgggaggcagcagtagggaatcttcggcaatggacgaaagtctgaccgagcaacgccgcgtgagtgaagaaggttttcggatcgtaaaactctgttgttagagaagaacaaggatgagagtagaacgttcatcccttgacggtatctaaccagaaagccacggctaactacgtgccagcagccgcggtaatacgtaggtggcaagcgttgtccggatttattgggcgtaaagcgagcgcaggcggtttcttaagtctgatgtgaaagcccccggctcaaccggggagggtcattggaaactgggagacttgagtgcagaagaggagagtggaattccatgtgtagcggtgaaatgcgtagatatatggaggaacaccagtggcgaaggcggctctctggtctgtaactgacgctgaggctcgaaagcgtggggagcgaacaggattagataccctggtagtccacgccgtaaacgatgagtgctaagtgttggagggtttccgcccttcagtgctgcagcaaacgcattaagcactccgcctggggagtacgaccgcaaggttgaaactcaaaggaattgacgggggcccgcacaagcggtggagcatgtggtttaattcgaagcaacgcgaagaaccttaccaggtcttgacatcctttgaccactctagagatagagcttccccttcgggggcaaagtgacaggtggtgcatggttgtcgtcagctcgtgtcgtgagatgttgggttaagtcccgcaacgagcgcaacccttattgttagttgccatcatttagttgggcactctagcgagactgccggtgacaaaccggaggaaggtggggatgacgtcaaatcatcatgccccttatgacctgggctacacacgtgctacaatgggaagtacaacgagttgcgaagtcgcgaggctaagctaatctcttaaagcttctctcagttcggattgtaggctgcaactcgcctacatgaagccggaatcgctagtaatcgcggatcagcacgccgcggtgaatacgttcccgggccttgtacacaccgcccgtcacaccacgagagtttgtaacacccgaagtcggtgaggtaacctttttggagccagccgcctaaggtgggatagatgattggggtgaagtcgtaacaaggtagccgtatcggaaggtgcggctggatcacctcctttctaaggaatagtacggaagactacacatcgtttgcctttgttcagttttgagaggtttactctcaaagataaatacccggggccttagctcagctgggagagcgcctgctttgcacgcaggaggtcagcggttcgatcccgctaggctccattaacgacagaggtcgttaagtttgttcattgaaaactggatatcgaagaaaatcaaaacaagtaacacacaccgagttgacaagttaaagagttttttaataagttcaacgcttattttcttgagcaaccttctatcgctagaagaagtactcaacaccgaccgtaaggtcaaaggttaagtgaataagggcgcacggtggatgccttggcactaggagccgatgaaggacgggactaacaccgatatgctttggggagctgtaagtaagctatgatccagagatttccgaatgggggaacccagcatcttttataggatgttacacagttgtgaatacatagcagctgtgaggtagacgcagagaactgaaacatctaagtacctgcaggaagagaaagaaaattcgattccctgagtagcggcgagcgaaacgggaaaagcccaaaccaacaagcttgcttgttggggttgtaggactccgatatggtagttgaaacagatagtcgaaatacttggaaaagtatgtcaaagagggtaaaaaccccgtagatgaaatctggctcacacctaggaggatcctgagtacggcggaacacgaggaattccgtcggaatccgggaggaccatctcccaaggctaaatactccctagtgaccgatagtgaaccagtaccgtgagggaaaggtgaaaagcaccccggaaggggagtgaaatagatcctgaaaccgtgtgcctacaacaagttagagcccgttaatgggtgatagcgtgccttttgtagaatgaaccggcgagttacgatagcatgcgaggttaagttgaagagacggagccgcagcgaaagcgagtctgaatagggcgaatgagtatgttgtcgtagacccgaaaccatgtgatctacccatgtccaggttgaaggtgcggtaaaacgcactggaggaccgaacccacgtacgttgaaaagtgcggggatgaggtgtgggtagcggagaaattccaaacgaacttggagatagctggttctctccgaaatagctttagggctagcctcggaattgagaatgatggaggtagagcactgtttggactaggggcccatctcgggttaccgaattcagataaactccgaatgccattcattcatatccgggagtcagactgtgagtgataagatccatagtcgaaagggaaacagcccagaccaccagctaaggtccccaaataactattaagtggaaaaggatgtggggttgcacagacaactaggatgttggcttagaagcagccaccatttaaagagtgcgtaatagctcactagtcgagtgaccctgcgccgaaaatgtaccggggctaaatagtttaccgaagctgtggagtgcaccgtaaggtgcattggtaggagagcgttctaagggcgttgaaggtagatcgtgaggactactggagcgcttagaagtgagaatgccggtatgagtagcgaaagacaggtgagaatcctgtccaccgtatgactaaggtttcctggggaaggctcgtccgcccagggttagtcgggacctaagccgaggccgacaggcgtaggcgatggacaacaggttgatattcctgtacccgttgtttttgtttgagcaatggagggacgcaggaggctaagaagtgcagactgatggatatgtctgttcaagcagtgagtcttagtgggagtcaaatgcttctactttcaaggacaagctgtgatgaggagggaaataatagtaccgaagcttctgatgtcacactgccaagaaaagcttctagtgagaaaacaatggcccgtaccgcaaaccgacacaggtagtcgaggagagcatcctaaggtgagcgagagaactctcgttaaggaactcggcaaaatgaccccgtaacttcgggagaaggggtgctgctctaacgagcagccgcagtgaataggcccaagcgactgtttatcaaaaacacaggtctctgcaaaatcgaaagatgacgtataggggctgacgcctgcccggtgctggaaggttaagaggagtgcttagcgtaagcgaaggtacgaattgaagccccagtaaacggcggccgtaactataacggtcctaaggtagcgaaattccttgtcgggtaagttccgacccgcacgaaaggcgtaacgatttgggcactgtctcaacgagagactcggtgaaattttagtacctgtgaagatgcaggttacccgcgacaggacggaaagaccccatggagctttactgtagtttgatattgagtgtctgtaccgcatgtacaggataggtaggagccgtagagatcgggacgccagtttcgatggaggcaatggtgggatactacccttgcgttatggccactctaacccgcagcccttatcgggctgggagacagtgtcagatgggcagtttgactggggcggtcgcctcctaaaaggtaacggaggcgcccaaaggttccctcagaatggttggaaatcattcgaagagtgtaaaggcagaagggagcttgactgcgagagctacaactcgagcagggacgaaagtcgggcttagtgatccggtggttccgcatggaagggccatcgctcaacggataaaagctaccctggggataacaggcttatctcccccaagagtccacatcgacggggaggtttggcacctcgatgtcggctcgtcgcatcctggggctgtagtcggtcccaagggttgggctgttcgcccattaaagcggcacgcgagctgggttcagaacgtcgtgagacagttcggtccctatccgtcgcgggcgttggaaatttgagaggagctgtccttagtacgagaggaccgggatggacttaccgctggtgtaccagttgtctcgccagaggcatcgctgggtagctatgtagggaagggataaacgctgaaagcatctaagtgtgaagcccacctcaagatgagatttcccatttctttaagaaagtaagatccctgagagatgatcaggtagataggtcagaagtggaaggccagtgatggttggagcggactgatactaatcgatcgaggacttaaccacgattgaaaaaagcaaggaaactcggaagagttttgattcttcgatccagttttgagtgagcaatacttactcaattgaatagtgtggtggcgatagcgagaaggatacacctgtaaccatgccgaacacagaagttaagcttcttagcgccgattgtagtgaagggtttccctttgtgagagtaggacgtcgccacgcgttttttttaaattatgggggtttagctcagctgggagagcatctgccttacaagcagagggtcagcggttcgaacccgttaacccccatatgagccgttagctcagttggtagagcatctgacttttaatcagagggtcacaggttcgagccctgtacggctcatagtaataacctatgcgggtgtggcggaattggcagacgcactagatttaggatctagcgccttcgggcgtgggggttcaagtcccttcacccgcacttcattgccggcttagctcagttggtagagcatctgatttgtaatcagagggtcgagggttcaagtcctttagccggcatcaggaatacgcggaaatagctcagtggtagagcaccaccttgccaaggtgggggtcgcgggttcgaaccccgttttccgcttttgccatcgcaatcagccggggtggcggaactggcagacgcacaggacttaaaatcctgcggtgagtgatcaccgtaccggttcgattccggtcctcggcatttcttaatatgcgcccatagctcaattggatagagtgtttgactacggatcaaaaggttaggggttcgactcctcttgggcgcgttttagcaacgggaagtagctcagcttggtagagcacttggtttgggaccaaggggtcgcaggttcgaatcctgtcttcccgattatattttcaaaaggggccttagctcagctgggagagcgcctgctttgcacgcaggaggtcagcggttcgatcccgctaggctccatatcatttgaataaatgattttttcgcggtgtagctcagctggctagagcgtccggttcatacccgggaggtcgggggttcgatcccctccgccgcgattattaagagcctggacctttagctcagttggttagagcagacggctcataaccgtccggtcgtaggttcgagtcctacaaggtccattgtggcattgtatatgttggaggattacccaagtccggctgaagggaacggtcttgaaaaccgtcaggcgggtaaaaccgtgcaagggttcgaatcccttatcctcctttactggattcttgatcggattgtagatcaatgagtacagcttttaattacttaaagcagctattgcttaattagtaatttattatcgcgggatggagcagtctggtagctcgtcgggctcataacccgaaggtcgtaggttcaaatcctgctcccgcaattgcttctgttaatacaatagaagcgtcaaataaaaactaaaatatggtttggtagttcagttggttagaatgcctgcctgtcacgcaggaggtcgcgggttcgagtcccgtccagaccgccatgcgggtgtagtttagtggtaaaaccacagccttccaagctgttgtcgcgagttcgattctcgtcacccgctttagtttttattttttgggcctatagctcagctggttagagcgcacgcctgataagcgtgaggtcgatggttcgagtccatttaggcccattgaactatatattttgttacatttggggaagtactcaagtggctgaagaggcgcccctgctaagggtgtaggtcgggaaaccggcgcgagggttcaaatccctccttctccgttttagcggtccgttggtcaagtggttaagacaccgccctttcacggcggtaacacgggttcgagtcccgtacggatcattgcaacactttttggaggattacccaagtccggctgaagggaacggtcttgaaaaccgtcaggcgggtaaaaccgtgcaagggttcgaatcccttatcctcctttactgaactcttgatcggattgtagatcaatgagtccagcttttaattacttaaagcagctattgtaattagtaatttattatcgcgggatggagcagtctggtagctcgtcgggctcataacccgaaggtcgtaggttcaaatcctgctcccgcaatcaaaaaaactaaatatggttccgtggtgtaggggttaacatgcctgcctgtcacgcaggagatcgcgggttcgattcccgtcggaaccgttatggctcggtagctcagttggtagagcaatggattgaagctccatgtgtcggcagttcgattctgtcccgcgccatcttgcgggtgtagtttagtggtaaaaccacagccttccaagctgttgtcgcgagttcgattctcgtcacccgctttagtttttttattttgggcctatagctcagctggttagagcgcacgcctgataagcgtgaggtcgatggttcgagtccatttaggcccattgaattttacttggtccgttggtcaagtggttaagacaccgccctttcacggcggtaacacgggttcgaatcccgtacggatcatgaaagcatcctttggaatgcttttttttttatgttttaaaaaaggcaattttaaaagtttttccataaattaggcacagtaggtcaaaatttgttataatcagtccgttgcaagttcccgaaaggattcgcagctgcgaagatgccttgtaaccgaatcgaaatttagggggaatacaaaaaatgacagagaaacatttatttacttcagaatctgtatctgaaggacatccagataaagtggctgatcaaatcagtgatgctattttagatgcgctgcttgctgaagatccaatggcacgggttgcctgcgaaacctcggtgacgaccggattagtattggtttttggcgaaatctcgacaagtgcctatgtagatattcaaaaaattgttcgcgaaaccatcaaaggaatcggttatacacgggcaaaattcggctttgacggtgacactgtggcggtattggtagccattgatgaacaatcacctgatattgctcaaggcgttgacaatgcattagaagtacgcgatgaagcgaatgaagaagaaatcggtgccggagatcaaggattgatgtttggttttgctgttgatgaaacaccagaattgatgccattaccaattgcattgagtcaccgtcttgttcggcgattagcagaactgcgtaaaacgaatgaattgacctatttgcgtcctgacgcaaaatcccaagtaactgtcgagtatgatgatcaagatcagcctcgtcgagtggatacagttgttatcagcacacagcatgatgatgcagtagacaatgaaacgattcgtcatgacgttattgaaaaagtgattaaagaagtgataccagcttctcttttagacgatgaaacaaaatattatatcaatccgacaggacgatttgtcatcggtgggcctcaaggggatgccggattgactggtagaaaaatcatcgtagatacttatggtggatatgcaagacatggcggtggcgcattttctgggaaagatgcaacaaaagttgaccgttctgctagttatgctgcacgctatattgctaaaaatatcgttgcagcgaaacttgcccgaaaggtagaggttcagctagcttatgcgattggtgtagcacaacctgtatcgattcgaattgatacgtttggaaccggaaaagtcagtcaagagaaattgatccaagctgtaagagagaattttgatctgcggccagctggaattatagaaatgttgaatctacgtcgtccgatttatcgtcagacagcggcatatggacattttggtcgtacagatatcgacttgccatgggaacaaacagataaagtggatgctttattggcaagtgtgaaggaataaagaggcgacctctgttgatgtaaatcaatagaggttcttttttttgacttagaagagggggagaatgatgaaaacgaatgtgacacgtgtgacgattgctgtttttgttgcaacatttatgacggctatcgaagggacgatcattacgactgctatgccgacgatcgttggttctttacacgggatcgagatcatgaattgggttttttcgatttacttattgactagtgctatgttgacacccatttacggtaaacttgccgataccattggtcgtaaaccgatttttttatttgggacactgctctttatgattggttccgcactctgtggcttgtcaaacagcatgctgacactcatcctttcgagagctgttcaaggaatcggggctggtgcgatgatgcctgttgcattgacgatcatcgccgacttgtaccctgtagaaaagagagcgaaagtcttgggtttgaacagtactgcttgggggattgctagtgtcgtcggtccattagctggtggtgtgattgttgatacagtcggttggcactggatcttttttattaatgtgccgattggtgtgtttcttcttggcatgatttggttttattttcatgaaaacaaaaagacgaagaaatctgagaaaatggatttacttggtagttttttgatgatggtcacattagtttctctgcttttagggtttcagttactaggcgatcaggggttaagtgttgctgtggtaagcttactgattttgactattgtaacattcctgctgttttatcgagtagagaaaaaagcagcagatccattaattgatttagcgttattccattctagaacttttgtggtagtaaatattgtcgcagcactagctagcggttttttgatgggtatcgatgtgtatatcccaatgtggatgcaaggagtcttaggaatgagtgcaggtatcggtggtcttgtactagcaccgttatcgattttatggatggtcggctcatttctagccagccgctggttgctgaagcggtcggtttcatgggtcctaacggctagtctattaattacgcttgttggcgcaatctggctttttattaccccaatgaaaacgtcttttctctggtttttaggaatctcttcaattaccggaatcggattgggagcgacgatggtcgtttgtaccgtgactgctcaaaccagtgttcctcattcacaaattggggtagcgacctccttcaatacgctattaagaacaattggtcagacaatcatggtttctgttttcgggatcgtcttgaatatcagcaataattttggattgaaagaagcaggtattcaagatcaggaaatcatgaatcgcttagtggacccaactgctgctaagaaactttcaacagacattctgcttcaattacgaggaattttgtacgatggattacattgggtatatggattaggattgttgctgattgtgcttgctttggtgtttgcccgtacaattcggcgagaatctggtacaatgataaaaaaagaatcgcaggtgatttgatggcttttatacaagcaaatatctattcaaatgttcttgaaatggaagtaatggtaaacgtgattctcccccaaactaccatcaaaaaggtaggtacaactacaaaaaatgatcaaaaagaattaccagttctatatctattacatggaatgggcggtaatcatagtgtctgggaaagacgaacttcgatcgagcgctatgtgagcgactatcaaatggcagtgatcatgccttcgactgatttggcttggtatacagatacaacttatgatatgaagtactggacctttgttgcagaagagttaccgcaaatctgccgagagctgtttcctcaattgagcagtgatcgggagaagacatttgctgctggtctatctatggggggctatggtgctgttaagttgggtttgcgtaaaccagagagttttgctgccgttgcctctttgtccggggctttagcgattgctgaaagcatggattctcttttaaagattcgaaatacttcttactgggaagggatttttggcccattggatcagtttcaaggttcagagaatgatttgatccatttgatcgatacgattgatccgcaaaaggcaccgcgcttttatattagttgtggaacagaagaccaactgtttcctgcaagtgaatatgcagttgcaaaaatgcaggaacgtgacttggcagtgacatttgagtctggttccggagatcacgattggcaattttgggatcagtggatccaacgggtattaaactggctcgttgaaggaaaataaaaaacatcagagaccgaagaatagtcaacggttctctgatgttttttttcgttcgatacaaaacaggactggtggttggttgcgctgattgatgaattgataggacagcacgttaaattgcgcttgtggtaattgacgacaaaagcgatgaacagcttctaactcttcaggtccgccttcgtggccataatagcatacaaggatgatccgaccgcaaggaacaatacgttggatcaatgcttgcagtgcctgttcggtcgtctcaggtaaagtaatgatttttttatcgctctttggtaagtaacctagattgaaaatagctgcatgaacggcatcagggacgtaatccgctactgtttcatgtccttggtggatcagttcaacttgcggcaggagtccttttgctaacaagcgttcttttgttgttgttactgcttgttcctgaatatcaaaggcatagactttgccttcaggtccgactagtgttgccaacagctcggtatcatggccatttcccatggtggcatcaactacggtctgtcccggtttgacgacttcttgtaaaagggtgtggctataacgcatggctgtttgtagcatagatagcctcttttctaacatcaaattttccttgataggagtcgcggcgcaacatttctttatcgatctcattcaagacttcccattttttgagactccacataggtccaatcaaagcatcccaaggagcgtcacctgtcagacgatgaatgatgatctccgcaggaatcatttctagttggtcgcaaatcaaagagacataagtctctctttgcatcaattgcagcttgccttcatgatagtcccggagcatgcgggtatttcgcatcaaatgcaagagatggagtttgatcccttgaatatctgagtccaagattgttttccgcacattttcccgcatcatttctaatgtttcaccagggagtccattgatcaaatgggtacaaacctgaatgccatgttttctcaatttagcgacaccatcaagatatgtttgataatcatgcgcacggttgattgcgttgctggtggtttcaaaggttgtttgtaaccctaactccacccacaaataaaagcgttggttcaattcagctagatagtctaccacatcgtctggaagacagtcaggacgtgtaccaatagaaacaccaacgacacctggcatggtcaaaacttgttcaaaccgctctcgaatgactgcagctggggcatgggtattggtgaaattttggaaataaacgatgtacttatcgacatgaggccattttttgtgcatcacatcgatttctttatgaaattgaacgggtagcggggcttcaggtgcaacgatcatgtcgcctgaaccagatacgctgcaaaaggtacaaccaccttttgcaacagtaccatctcgattgggacagtcgaagccagcatcgatcggtactttaaatattttttcaccaaattcctgacgcaatgcataattccaagaatggtaacgtttatgctgattttcggcataggggaatgaattcatggattttaccttcttttcttttttctaagattgtttttgttggaaacgccagacaaaacgcttttctaaatagtacggataggtcagtaacagccaagagagtcccacacaaaatccgccgagtacgtcgctaggaaagtgaacacctagatagatccgactgataccgatcagaaaaatcagtaagccaagcaagattctcataccccagcgtaacgcttgtgactggaaaaagacaggaatcagcaaaagtaaggttccataaaataccatgctgccagtggagtgtccgctaggaaaactagagcttgtctccaacactaaatgttccagtgtaggtctttctcgcataaagaataatttaatcaacggattgaagaccgctgagatgccaatcgtaccgaaactgagccacagtgcttcggaatagaagcgattgataagcaacacgaccaatacaacaatgaaaagcagtccaatcgttactggattagcaaacttggtcacccataggaaaaagtcagtcaaaaaaggataaccgctacggatcaaacgagtgctactttcatcgaaaggattcagccaagttggatagaatttgacaacatagcctaaaaaggaaaaaagcagcaaaaaacagctgccggcgaattgataatacagttttttgttcataaaaaaatcctcatttctacaggcaaacatagtgagtctattataccatttatcttggagggacaaaagacagtggtgcaggggtgtttcttgagggacaatattgtataacaagaaattgtcgcttacttcttctttcgaataatgtacgttagattacaaagagtttacagtttggcgaaaagaaggaaataacttttataaaatcttaagaaattgtatactaaacgtaggaaaaaaatagaagacggaggaacgttcatgaacatgagtttatcgcgcaaagagcgtcgcagagaaggacagtccagtgaattttatcaaacgatgagaaaaagtgccgctgttgtagggacaaccataaccgcttgctcagtagtagcgcctttgctgactccagttcaagcggatgccgtagaaaatactgtggtgagaagtaactttgctgcacctaatacagcagcattcattacagaaatcgcaacttatgcacagcctgttgcccaagcaaatgatctttatgcttcagtcatgatcgcacaagccattcttgaaagcggctggggaagaagtgccctgtcccaatcacctaaccataatctttttggaatcaagggcagtcataatggtcagacagtctatatgaatacagcagagtatttaaacaatcaatggttgactatgaaagaacccttcaaaaaatacccttcttacaaagaatcttttgaagacaacgcacgaacattaagaaatgtttcgctaggaaacggtaattattattatgcaggtgcttggaagagcaatacgtcttcttaccgtgatgcaacccaatggttgacggggcgttacgcaacagctcccaactatgcttcttcattgaatacggtgatccagcagtatggcttgactaaatatgatacaccagcttcaggcaatgccggtggtggagcaacggtcagtacgcctaataccgctacaaatcctgtcagcaagccagcagcgacatcgtcagtttcttctggtagtcaaggctatacagttgcgtcaggggattctgtctggggaatcgctaataaattcggcatcacaatggatcagctatgtagctggaacaatattcgcaataattttatctacccaggacaaaaactgacgatcaatggtggtactgccaaacaaacgacgaatacagggaccatatctaccacgacagcaagtgctggtagttatactgttgcttcaggggactcggtttggagtgtggcgaacaagcatagtatcacgatggaccaattgcgcaactggaacaatatcaaaaatgactttatttatcctggtcaacacttagtcgtaaaaaatgatactgggtcaaaaagtcaggccaacaagactacagcaataagttctgtaaccaatgctggtagttataccgttgcttcaggggactcggtttggagtgtggcgaataagcatggcatcacgatggatcaattgcgcagctggaacaatatcaaaaatgactttatttatcctggtcaacgcttagtcgtaaaaaattctggaaataaacagacaagtagcccgaccacagcttctacgagcatttcttcatcagctggcagtcaaaagtataccgttgcttcaggggactcggtttggtcgattgctaataaatttggtatcacgatggaccaattccgcagttggaacaatatcaaaaatgattacgtctatcctggtcaaagcgtacgggtcagcggtacggcaacggctgcgaatcagacggcaagtacgagcaactataccgtagtatctggcgattctgtctggggaattgcggataaatttggtatttccagagatcaatttattcaatggaataacattaaagacaactttgtttatcctggccaaagcgttcgcgtaaaatagattgctattccgctgtttttttgataggataagtgcaaagaatctttcacatttgagaaggaatagtagaaacgtgttggaatcaagagagtgcatggctggtggaaatgcacagaagacctttcgaactcgccttcaagtgatatttgactgaaatgagtgtttctcagaaccgctcaaagtaggcagatacggcgatggtcgttaacacatcgaggtctgtttcataacagataaaattaggtggtaccacgtttataacgtcctataaaaatcaatagtgatttttataggacttttttttaagttctgctgatttttgatcaagtcagagcaccaatttttaggaggcgtccatagtgaactacaatcacaaagaaattgaaaaaaaatggcaaaaatattgggctaagaaaaatgagttcaatacccacgatcaaccggataaaccaaagttttatgcgttagacatgttcccatacccttctggacaaggattgcacgtagggcatccagaaggatatacagcgacggatattctaagccgcttcaagcgcagccaaggattcaacgttcttcatcccatgggttgggatgcttttgggttgcctgctgaacaatatgcattggataccgggaatgatccggccgagtttacgaaaaaaaatattgaaacattccgtcgtcaaatcaattcactggggtttagttacgattggaatcgtgagatcaacacgacagatcctgagtactataaatggacgcaatggatttttaccaaactttatgaaaaaggattggcttatgaagccgaggttcctgtcaattgggttccagagttaggaacggttatcgccaatgaagaagtgatcgatggcaaaagtgaacgcggcggctacgatgttattcgcaaacctatgcgtcagtggatgttgaagatcacggcttatgcggatcgcttgctagatgatctagaagaagttgattggcctgagagcatcaaagaaatgcagcggaattggatcggtcgttctgtgggtgccaatgtcaccttcaaagtagcgggtagcgatgcagcattcaccgtctttacgacacgaccagatacattgttcggtgccacttatacggttttggctcctgaacatgagttggtacaagccatcactacaccggagcaaaaagcagcggttgaggcatatgttgcagaaacagcgaagaagtccgatttgaatcggaccgatttgtctaaagaaaagacgggtgtcttcacaggggcctatgcggtcaatccagcgaatgggaaagaagtgccaatttggattgctgactatgtgttggcttcatatggtactggtgcgatcatggctgtgccagctcatgacgaacgtgaccatgaatttgcaaaagcttttgggttagaaatcattcctgttctggctggaggagacgttgaagaagctgcttatactgaagacggtcctcatatcaattcagagtttctggatggtctagataaagaagcagcaattgaaaaaatgaaccactggttagaagaacaaggagtcggtaaaaaagaaatcagctaccgtctgcgagactggctgttttctcggcagcgttactggggtgagcctatcccgatcattcattgggaagacggtactacaaccactcttccggaagatcaattgccactacgcttgccaaaaaccgataatatcaagccaagtggtacaggtgaatcgccattggcgaatgtcagcgagtgggtcaatgtcgttgatccagaaacaggcatgaagggacgtcgtgaaacgaatacgatgccacaatgggcggggagctcttggtacttcttgcggtttatcgaccctcacaataaaaatcgcttagccgattttgacaaattgaaacgctggttaccagtagatatctatatcggtggggcagaacatgcggtgcttcatttactttatgctcgtttctggcataagttcctttatgatcttggtgtcgtaccgacaaaagaaccattccagaaattattcaatcaagggatgatccttggggaaaacaatgaaaaaatgtcgaagtctcgcggaaacgtcgtaaatccggatgatgtcatcgaacaatacggagcagatacactgcgcatgtatgaaatgttcatgggtccattagatgcatcgatcgcatggaatgaaaacggcttggaaggcagccgtaaattcctagaccgcgtctggcgtttgatcgtggatgaaaatggcaaaatgcgtgatcgaattactacattcaatgatggcaaactaagtaaagtttacaaccaaacagttaaaaaagttaccgaagattttgaacagcttcatttcaacacggctatttcacagctgatggtctttgtgaacgaagcatataagtccgatgcactaccatatgaatatgttgctggatttgtccaattgttggcaccgattgcccctcatatcggtgaagaactatgggcaattctcggaaataaagagggcatctcttatgtgccatggccaacttatgatgaaagtgcgctagtcgaagatgaaattgaagtggtattccaagtgaacggcaaagttcgggcaaaagccaaagttcctgcggatgcagacaaagcgacgctcgaacagttagctcaatcaaatgaactggtaaaagaacaattgaatggaaaaacgattcgcaaaatcatcgttgtaccaaataaattagtcaatatcgtcgctaattaattgaaaagagggactgtgccataagtctcctacaagtaaaactctccgaacattaactattattgctcctgcggtgcagggactcctcgtcgcaaaagtcagaggaatctatcctagcaatagactattattcggtttaacttgttggatgatgacttatggcacagtccctctaaacatgtctaaacggtcggagcagatgcaactccgagaaataagtcgaaatacccaaaaatttgaaaagcaatttctgtgtattcctccttatttctcggagtttaacacttctgtccccgctttttttgtacaaaaaagcagcggttcagctgatgcaaacatcaactgccgctgcatactattttttgcgaataatgccgtaaaacaatacagctgtagccactaatggaatgaagatcaccaatagaaagccatttggatatgttgcgcgagtgaagatttctgtggaagtatcatttgtgccgatcaagtggtttgctactaaaaattgtccgaccaatgcgatcattgctagaaaacctactgttgcccctgttccaaagaagatttttttctttgtgctgttcattgcgtctgcccctttaatattctctatgtcccattatacaaaaaatgaaaaagtcttcaatgcgattttgtcaaatcattgattcgtaatacacttgaaatgaatttgacatatttttttagtcagctgactctttctaagtgaaacggcaatcaaatcattcgctgaactaagaggggtctcgtataatagaattaacgcaaatgaaagcgcagaaagaaggaataaaaatggactatcaatcttttgaaggtcaagaggcttttttcaatgattatcaacgagtagcaaaagcaggttaccaagaagaagaagtgatcgatgacgtgctggaacagctgaatcagcaattgactgcggaccagctaatttaccgagtggaagcggaaaaaacgaaagacggcgaagtctttctgtttcctttcagcaaattcatgtataccgaagatttggacgcagcaatctcgacagaatttcgctatgatggtgctccttatgtctatgaaacctatgaggatgaacaaccataattttcagcaaggtatttaaatcaagaactttttaagaggcatttgcatagacacaaaaataaacacccaaaggatgacccgcttgatgctgtcattctttgggtgtttgttgttaacggataggtgaggcaatgaaaaaatcaaagcaaacgctgagcgatctgcaaatcaccttcataaggttctttttgaccattgactttcaaatattgctcagcgcctttaccagctagaatcacgatatcttgactagcggcttcagcaaccgctgattggaccgcaaggctgcggtccatctgttcttcaataatgacagtaggtgcagtgatcgcagcggctatctcggcagcgatagcacgaggatcctcaaagttagggtcatcagaagttaaatagactttatctgcatactcagaaagcgctcgacccatgtcaggacgtcgtgattctgctttgccgccggcactgccggtcacaaaaatcagccgtccttttggccgcaatgtatgggctagctcactcagtgacttaaagcttaagtagttgtgggcataatcaacgatgattaatgcgccattttgtttttccagaacgatcattcgtcctggaatcgttacattaggcaagacagattgtgcttcttcttgggtagctcccgcaagacaagcagcaacgattgcagcagtagcattgtcgtgattgaattctcctagcaaagccaactgatagtcgccattcacaagaagaatatctttttcagaatggatgcggaatgatttaggatcgcccgattccgctggtaatacttgataatctccatcgcattggccataggtgatcaatggtacttgatgagcagcacaagtttcttttaatagttcaaaataatcgctttgtcggttaatgatcatttgtttactattgtggatcaactcgcgtttgcagaaaagataatcatcaaagtccggatgttctactggaccgatatgatcgggcgaaatatttagaaagattccaatttcataagtgatcccagagacacgtttggttttataagcttgggaagagacttccattactagatgtgtcataccattagcgactgcttcggccatcatagcatacaagtctaacgtttccggagtcgtcaaaactgcttcctgatagttctttccgtcaacagtattttcttcagaggagaaaaaagctactttctgattggttgttttggctaaaatctcccgcacaaaataagcacagctcgttttgccttttgttcctgtgattccaattttaaacagctgatcttgcggattgttgtaaaaagcctgggcaatacaagccatggctgctcggatatctgtaacgatgatgccataggcggaacaattttcataagggtgttccgaaacataacattgaagaccctgagcaacggcactttccaaatagctttctttgaacgcggcacctttacagaagaatagcgtatttgcgtctgtctgacgcgaatcataacttaatgaggtaaagatcaagtcgttcatttcttgtggaacggtataatgccattcttggccgataaactcttttaatagatttgcttcgatcaacaacccgcggatctgatggggggtaatggtaagtagtgacatcttggttctcctcgtttcaaaaagtttagtttattatagcatattcaggcaaatcgaatggaagacagcatgcgattggtcgttcttcttcaataatgtgaagaaactttaatatgttgcaaaaatagattgctcgaagtcctttttcgaattaaaatgaaggggatatgtttgtagaaagttggagagaactgccatggataatcatacgcaatctgcgtcaaaacaattaacgacacaagaaaaaatggctcaaggatcggcttggatgacactgggaaacattggttctcggttgctcggtgcgatctatattttgccgtggtactactggatgggagccaacggagataaagcaaatgcattgtttggaatgggttacaatgtctatgctttgtttttgatgatttctactgcaggaattccagcagcgattgcgaaacagatttcctactacaactcaagagaagagtatcgtacaagtcagcgcttgttcctgagagctttacagttgatggcaggatttggggtagtaactgctggtatcatgtacatagccgctccttggttggcaaccgcatctggtggcggagaagaattgattccaacgatgcgctccttaagcgtggcacttttggtctttccatgtatgagtgtgatgcgaggatatttccaaggaaatcaagacatgaaaccattcgcgatttctcagatcgttgaacagatcgcgcgagtcttctatatgctgttggcaacgtttattatcatgcgagtggtagaaggcgactatacagctgctgtgactcaatcaacgtttgctgcctttatcggcgttttagcaagtgttctggttttggtttattatttccagaagcagcgggttcggatggatgttttgctggacatgagcaaagaagaaacagagatccaaaccaaagaattggttttatccaccatcaaagaagcgattccttttattattgttggttctgggatcacaatttttaaactagtggatcagtatacctttgttcgaattatgaaaggatttacacaatattccaatgatcagctcttagacatgatggcaatctttggcagcaatccagacaagctgacaatggtcgtgatcggcttagcaacgtcgatggcatctacagggttgcctttaatcagtgaagcagtagcgaaaaagaatcaaggaaatttagctaaattgatcagtaataacctccagttgtattcctttgtcatgctgcctgctacgtttggaatgatcgtattggcgtatccattgtatacattgttttatcgaccggatacattaggggcaagcgtcctcgttgctgcttgtatctctggcttaatcctgggcttgttcatgctgacttctagcatgctgcaagggatgtaccataacacagaagcggttatcttcttctttattggtttgttgctaaaatttattttgcagtatccggccatctggctgttccaagtttatggtcctttagtctctacaacattggcacttggtgtgacttgctggctgaatattagaaaaatgttgactaaaggccacttcaatgccaagttgacctttagaagaacggttttgattttcctgatgactctcattatgttagtgatcgcgctgattgctcggcaattgtttggtctggtcttaagttcggatcgcaaagtccaagcctttattctttctctactggttgcagcagtcggtggcggggcctatatttatatggcattgaaaatccgcttagcagaaaaactactgggctcatcaatgattcgtttgcgtaagaaattgcgaatcaaataacccaataaacctgattagccgctgagatcgcatggatcgatcaggcggttttttcagtaaaaaagatcgcaaagagagaggcgagaaaacatgcgactagataaattcttagcagatatggggtatggctcacgaaaagaagtgaagcaagcaatcaagaaaggcgttgttgcggtcaatggtcaacaagtcaaaagtgataaattccaagtagctgaacaagaggatcaggtttcgtttgcaggagaactggtacgttaccagaaagatttctattatttattgaacaaaccggctggtgtgatttctgcaacgaccgatccggaaaagacagtattggatttgtttgcggcggaagattatcgccgggatctttttccagtcggtcgtttggataaagacaccgaaggactactgctaattacgaatgatggccagctagctcatcggttattgtcacccaaaaaacacgtcgaaaaagagtattatgcagaagttcgagggatcatgaccgaagaggatcgtcaccaatttctccaaggaatcgaactggatggggaaactctcatgccggcacagctgacgattttaaaggtagacgagcaggccgagacatccacgattaccttgattttgcatgaagggaagtttcaccaagtaaaacgaatggtgcaggcagtgggaaaagaagtgacttatctcaagcgtactcgaatgggcgggttacagctgccgaaagatttggcattaggagagtatcgctcagtgacagaaaaagagctggcacagctttctgctgaaccagcggaagattgaattgttgcagcgaatgaagcctgacggctgtgcccagtatgtggaatgagactagaggcaatgtctctgctgcttcagaaacattctgtccatcaccagagcccaggcagcgctttgatctgcagtgactcttgtgagaatggatgggtcaaataaagttcataggcatgcagctcaaggcgagctgcagtttttttctgataaagagggtctccgacgataggatgtccaatgctagcaaggtggacacgaatctgatgcgtacgtcctgtatctaatacacaatagatcgaagtcgtttgggcattgcgagcggcaatctcaacgtgtgtcaccgcagataagccattgcgtgggtcaatgactcgtttgcgacggtcgtggcgatcgcgtccgatttttttgcgaatggtttggttttgatccaattgtccccagactgttgcttggtagcgacgataaatttgcttactttcaagcattcgtcccaaaataggcaagactaaggggtttttagcaaataaaatgacgccgctggtctctttatctaatcggtgaacgacatagggtcttgtctctggtgaaagatatgcagccagatcattcataagtgtgtcggtttcatttggttggttggggtgggttttgataccagcgggcttattgacaacgatcagatgttcatcttcaaacaacaccgtaatcttctctttgttcccagaaatcactggctgatacgtgtaatctgcttcttctagaagaagcgtgagctgatccccacctgctacttcctgatgaaaaagggctgtttcaccgttgacgcgtacatttttgcgggttcgcagtaaatggcgtactttgcgagggacgagccattcttgttctaataattcccgaatcgttgttcggggatggtcattaggtaatgtaatggtatattccataaaaatccctttctaagttgtgatctatttgctattatagcatctttaagattttcttataaaaaaaacaacaaaaaacagaagtttcgctgatagaattgacgagcaatcttttgtggatgaaatttactgctagagccgtattccaaacggtttgatatatgctacactttgttaaaaggagcgtggagaaatggatttgaaacaaatccttcacaagataaaagaatcgatccaaactttctggcgttggatcaagccttatctacagcaattccatcaatggcgcaaacgcatttggaagaaatatcatgtgaataaaatagttattttactgactttagtgggtattttagtgatgagcggttacttgttttatatcgccaagaataccaaagttagtgaattagaatcaggattgaaagagtccactgtgatctacgatgctaaaggagaagaagctgggcagctctattctcaaaagggcacctatgttgatttaaaaagcatttccccagcagtcgttcacgcactgatctcaacggaagaccggaatttttataatcaccatgggtttgatatcaaagggatcgctcgggcggccttgcggatggtagtcaatcgtagtgcagaaggtggcggtgggagtacaattacgcaacagctagcaaagaatgcctatctttctctcgatcaaacctttagtcgaaaagccaaagaactgtttctagcgattgaaatcgaaaaaaaatactcaaaagatgaaatattggaaatgtatttgaacagttcctatttcggtaatggagtctgggggattcaagatgcttcgctcaaatattttggtgtcaatgcttcagatttgacggtgggagaagcagctaccttagtaggtatgcttaaaggtccatcaatttataatcctatcgatcatccagaaaatgcgacgaaccgccgagatactgttctaggactgatggtggacaacaaaatgctggatcaatctgtggccgatcaagaagagcaagtttcaatagctagcctgttgtacgatggctatggcaattcagaatctggctataaatatccttattacttcgatgcagtgatcgatgaagcggagtcttacggacttgatgcggatgatgtgatgaatcgtggatacaaaatctacacagcactggatcaaaactatcaggcacaaatggaagctgcctataaaaacgatgcgctctttccagaaaatgcgtctgatggaacgatggtccaatcaggttcggtggcattagatccgacaactggcggtgttcaagcattggtagggcgacgaggcgaacatgtttttcgcgggttcaattttgctacccaaatgaaacgctcgccaggttcgacaatcaaacccatcagtgtttatgcacctgcaatcgaagcgggctataatccagatagtattttggaagacaaacctcaaagttattatgaggcaaagaattacgatgggacctattccggtgaagtgccgatgtatcaagcattggctcaaagtttaaatctgccagctgtttggacacttcatgaaattggtctcgaccgcggatacaaaaagactcaggaatttgggctaacattgtcagaatcggacaaatattggggattggcgttaggcggattggaaactggcgaatcaccgttgaccatggctgccgcgtatggtgtctttgctagcggaggctattactaccaaccgcatttgatcaccaaaatcgttgattcaacgggcgcggttattgtagataatacttcagtcaaaggaaaacaagtcatctccaaagaaacagcagacaagatgacaagcatgatgctgggtaccttctctaatggaactggggtcagcgctagcccttatggctttacgatcgcaggaaaaaccgggacaacggaaacaaactttgatttatcaaaagtcaatgatcagtggatcgttgggtatacacctgatctcgtaatctccacctggctgggctttgaacaaacgagtgccgaacactatttgactggaaccagcgggcaagtcgtcggcaagatatttaaagcggaagccgaaagtctgttgccttacagccaaggaagtcagttccaagtagcagatgcctatatgactggtgggaaactgatggcagcagatgaagtgccagatccaaatgaatcaacggacaacgatgactggaaaaaatcagttgacgagtttgccgaaaatgccaaagaaggattaaaagattttggtgagcgtgtcaaacaaggaaccaaagagctttttggtaatctatggaatacgatcaatggtaattgatgttagcttctactgcatgtgcatccgaacagtatgttataataagaaaaaaacaaagtgagggaacagtatggcaaatatttatgacacagcgaatcaattagaacgagaattacgagaatccgaacagtttcaagatttaaaagcctcgtttgatcgtttgaaagaaaaccaagaagcgtatagcttattcaaggagttccaaggcttgcaacaagctttgcaacaaaaaatgatggcaggccaagaaatgacagaagaagaagcacagcaagcacaagaactctctcaaaaaattcagcaagatccaatcgtttcggaattgatgcaaaaagagcaagcatttagtctggtggccaatgatttgaatcgaatcatcatgggccctgtgcgggacttatacgaagcctaagcgctagcctgctgacttaccgcagcacaaaagagtccaagaggggttctcaaacagaggcctcggacttgtgccaattctatgccaatttacagtgctttagatagcgttagaggctaatttgagcggacaacattcgaaggatcggggacttcctcgacccttcgaattttttgttcaaaaaggcgaacaaattttcgtgttttgctgacgaaaaaacaaagaaatgttatgatagaagcaaaagggggaaaggtatcatgcgttttttacatagtgctgacttgcatattgatcgttctttcgaagggatccgcatgttatcggataacgtcaaagagcagcttccgctgatcaatcgaaaaataatcaaaaaactggttgatacggcactggagcatgaagtggattttgttctcttggcgggggataccttccaccaagcccgtccaagtctgcggatccagcatgacttttttcaagagatttcccgacttgcgtcagcagagatccctgtctatatgatctttggtaaccatgattactatgatccgcagcgttattggtttgattttcctgagaatgttgtgctgtttcccagtgagacggttgaaacgatcaaaggcgtaaccagaaatggtgagacctatgctatcagtggctttagttatcagcagccttggattacacagaacaagatcagggaatttcctaatcgccaagcggttgatttccatatcggtatgtaccacggggatagtgcgggggaacattatgcaccattttctgtgagtgaaatgaagcagaaaggctatgattattgggcactaggtcatattcatgttcctaagatcctttcagaagagcctgcgatcgtttatccagggaccccacaaggcaaaacgcaaaaagaacaagatacaggcgttgttttagccactttgagttcccatggtaccgagatccagacggtcgacgtagcagaaatcacatgggcacaacaagaagtctcattagcagcttgtaaggatcagcgttcgattttgcaaacgattttgaaggaggtcaacacgaatcagccacgactgatcaaattagtgctgacagatacggatcagttatcttcagattggttttctgaaaccgaaaaaaatgaaatgatcgcctatttgaacgagcagctgtcaagagacgtattacagacaatttatgcaatcgaagtctacaaaacagagacagacaaaattccattagcgatcccggcgtcctatgttgatcaattactagctatttatcaagactcgtctatttttgctgaaggactgaatgatttgcttcgtcatccgttgctttatcgcgggattgatcaaggtgcctttcaagaagaggtcttacagcagacgaaacacttgctggagaatgatttccagtgggaggaagaagtatgagaatcttaaaagcagaaatcactgggtttggccgttaccatgatcaagtgattgaattttcccaaggaaatcaattgctttttggcaacaatgaaatcggcaagtcgacattgtatcagtttattgcggctatgctgtttggttttcctaaaagaacagctaagaaaaaggattatacccccaaaaatggggccgcttatggaggcagattgtggctagttgtcgaaccttacggggaagtgatgatcgaacgttaccgtcaaatcgatcgaggaagagccaaagtccatttcaacgggcagaccggcgacgaggaaatgctggcacagttgctgcaacccttgaatcagacgttgtttttcgatgtatttacttttcagcaagaacaacttgcccaaattgacaagctgcaagaaaatgaattgcatcaagcactgatttctttgggaatcagtgggagtcaaaagatgctgcaacaagtggctcgctatgaagcaatcaatcaacaaaattataaaccacggggacaaaaactccctttgaaccaagcgttgaaacgtttggagaaactacaggagaaaattgcccaaaaagaaagcgaagaacatcgcttgcaacagcagtatcagcagatttcacagattcaaaaagaattgcggcaattagaagaacagcagcaagtgcaaagcgatgcttatcaagctgttcaacaacagatcagccattggccattgtatgaagaatggcaacagctatcaagccagccagctgcagtagcagaaaaagacgctcaggaaatcagcagattttatcagacctatcagcacttaacagaagatattcatcaaaaagaagcagaacttgatcgtttggaacaagggcaagcttcagataaatatttcttttatctggacaacgaacatttgatcactcagatccttcagaaacaagttgagatggcccgattgatggatcggcaggaacaggcgctagaaaaggaacaacaagcacgaatggcgttgaaccagctgatcaatagacggcaatggtcaaaagaatcaccaccactgcagacagaacaaatccaggaacaattaatgaatctggagcaaagcgactaccagttagaggaagcaaacaagcgcttagagtggttagaagagaaggaaaatcatcttcaacatgctttatcacggttggaacaggcgcacccaggattgatgggagagcaaaaaatggctattcctatggtgccattagtaggtggtttggttgcttgtgttgcagcattctttttaccgtctccttggcgctggttgtgtatagcggctggcaccgttggtattggactagcaatttgggaggcaatgaaacaacgtcctcataaacaaggtgacagcaaaaaacaatggcaagagttattgttgcaaacggatctggttgcctcagagatcgcagatctgacagaagccaataatttacaaaaacaacagaatgaacgatggcgtcaggcgctgcaacctttttttggcacggaaccttatcacagatggtcggtcttcttgctgcagtaccaagaggatgttactaattatcagttgcatgctcatcagcttcgcgaagccaaagaacaactgcaagaggtcacagaacagcttcagccttatcaagcgatgtttacaccttttgctgattggttgcccctgcaaaataagacaatactggagcaggctcagctattgcatgaattcaatgaagagatgcaggctgttaaattggcgcgtttacagcagcccagcacgttgttggcgcagcaacttgctcgcaaaaaggcggagcgggctgaattgttgaaggcttctcaagagattctctcacaagttggcattgatcagccagcagaaatcagtctttggctcaaacaatgggagacgcatcagcgggcggcaaagcgggaagccgaattagcagtcatgctggatccgattttcccggaaccaatcacacaagaagaattgctggaaaagaaaacgcaagtggcacaaaagcaaaaagagctgcaccagcttagtcgacaaaaggcagagcaaaggcaacggcttgaactagaagtagccgccagccaaaaaagcggtacgttgagccagctctatcaggaagaaagcgaactgcgggcaaaaatcgaggaattggctcttgcttggagcagtcgacaattagctgcttcggtattgtccgatttgacgactgaattgtctgagcaacaattgccgcaattactagaaaaagcttcgatatatttcagattgctttccaatgaccgctatcaccaagtaacactgcatgaggggcaattagttgccagcaatgctagcgatagttactcgatcatcgatctatcaacaggaacaaaagatcagctgatcatggcgatccgcttcggttatcttgcgttgcaacaaaatcatcctcttagtcccatcattatcgatgatggctggttgcattatgatagtgcacgaaaagaacggttagcggaattattcgctgagtttggccaatattaccaagtaatttgtttgtcttctgaccaagaaatggtaagctattatcataaataccagcaatccgtacaagaacttagtcaaaggatgtgagaaatttggctatgcgccaaatgttaacatgaaaaaaattcgagaattgaccgtagatgagacgtttcaactgtttttgttgattaaaaatgcggatgttcgtatcgcaaaaaatggcaaaaagtttatcgcgtttacttttcaagatacttctggaacaatcgacggaaagttttgggatgcttctgaggaagaaatcaatcgcttcgaggctggtaaggtcgttttattagatggaaagcgagaagtttatcaaggaaatccccaagtcaagattttgcatctgcgtctggcaaaaccagaagaacctcatgacccgagccagtacatggaaagagcccctctgaaaaaagaagacatggaagaggaaattaatcagacattgtttgaaatcaccaatcctcattggaatcgtatcgttcgttttttgctgaataaatacaagaaagaattttttgattttccagcagctaaacggaatcaccatgcctttgctagtggattggcttaccatacaacgaccatgttgcgaatcggaaaatctttgatcaaagagtatccggaaatcaatgcaccgcttttgtatgcaggaattatcctgcatgatttaggaaaagtgattgaattgacgggaccaatgaccacagagtatacattagctggaaatctggttggacatttagtgctagtagatgaagaaatcacccaagcgtgtattgctctgaaatttgatgataaacaagaagatatcgttgtgctgcggcacatggttttggctcatcatggattgttggaatatggctcaccagttcgcccaagaattatggaggcggagatcctgcatcaaatcgataacatcgatgcttctatgcaaatgatgttgtcatctattcgcttaacggaaccaggagaatacactgagcggatttttgggatggataatcgtagtttttatgtgccgaaagatgtataaataaaaaaagattggcttatgccaatcttttttttctgttatttttcagaggaatctgtagcagatgaactagttgtttcagttgattcttttgtagaatcagttgcattctctttgttatctgatgcatctgtagcagaagaatcagttgaatcttttgtttctgctgcagaaacatagtcagaaagaatatcagctagatcttcatctttcattttcacattggcagctttcaattctttaccaatcgtttttgccacgaatgtagaatcgttcaatagcgtgttttgtgcgatttctgtgatttgatctttgtatttatccatgtcgttgcctttgtcttggtttttgaccattttgacaatgtaatagcttgttgtataagtagaagcatccgtagcagaaatgacctctgaaatttcaccatcttttaatgcaaaggcagctgtttgtacttcagctggcacagttgttgaggttgagtcgaatttgactgtaccgccatcttctgcagtcgctgtgtctgttgatttttcttttgctaatttactaaagtcagcaccatctttttgagcttcttttaatacatcttttgcatcatcttcactagtcaatttgatcaattgtgcttcaacttctggatggaaagaatcccaagctgctttcagctcatcatcaccaatatccatgttcgcttttagcccttcttgtaatgctaattgctgtctgatttgttcacgatagctttttttagtaagtccagaagcttccaatgcagactcaaatttatcactgtcgccatattgtttcgcagtttgatcgtattgcttgtcgatcattttctctgtaacatcatccccatatttttgatcgaagacttttaagacgatcaattggcggataagactttggttattctgatctgtttttgcttgttcgtaaaaatcttcaaccgtgattttaccgcctttcatggttgcaatctcattacttgaacttccggaacaagcagctaatgttaaaacgctcagtgcactgactgctgctaaaatcaattttttcttcattcgtttaagcactcctattttctaaatatttcaaagaatcacagctaatactataccacactctttttttaattgggaagaaaacaaatgatgtttcaaacaaaattcatagattctccaatatttgctacttattttcttcttggggaactgatttggcttgtatcgtcgtgacatgttggttcaaacgatccacgtgggtctttatccgctcgattcttggctgtgcttggaatttgaatgattcaaaatcttttgtgaaagactctttgacaacaggaatcgtttcgtcaaccgttttacgcgtcaatgtgacagcatcttttaagtttttgatactttcattaaactcaagagtcgcttccgtggtctcatcgacataacgaagcatttgttcacgggtttctttaccgctttttggtgcaaatagcagcccgcctaagccgccggcgagagagccgaataacaaacctttgataaagttaccgatcatttagtccaccagctttccgattttttcagcgatctctgttagctgttcctgtgagtaatcctctgcatgattaccgaaatgcatcgagaaatcatctttttcatcgtaacgaggaatcaaatgaatatgggaatgaaaaacagattgataagccaattctttattgttattgattatgttgagtccattgatctcaggaaaggctttttcgattgcccgagcgattttaggaacgcgagcaaagacctctgcagcaagggcttcatcatactcaaaaatatccgttacgtggactttcggaataactaatgtatgtccaggtgttacttgggaaatatccaaaaaggcatagacttgatcatcctcatatactttgtaactagggatgtcacgattgttgatcttacaaaaaatacaattttccatttcataaacctccttgttcttctagtcctactttaccatattctgctgatttcggcagtttttgttcttgaattccttcaaaagcaggccatcgcttcttttccatgtaaagtacggatgtttgtggagagaaacgcttgcatttgtccgcttgcaccaatagacttaaaagcagaaatagaaaaggacggatacgatgaaaccaatcattaaagaaacgttacagaaaaaaaagaccaaacgagaaaaaatcagctatcttgcctatgcatataaggagtggctgattgcaggactagcagtcattctagtaggaggttcgctgatctattcgatgacaagaccaaaagaagttgtttatacagtggctgttgtttctgagaccagtgaacagcagcccacacaatctgaatttgaaaaagcagcgacggattgggtgaagcaaaacgtggcgcctgatcacgaaataacagttacatttgtttcctatgaagatccagccgctgtccaagcctttacgacccgtttagctgccggagcaattcaagccgtcatttttgatgcgtccgaagcagacatgtgggtcgagcgttttggtagcagtgagctgccaaaagaaccattgcaagtagctggacacgagtatgttgttcaaataactaataacggaaaatagcagatttcaagaagtagatgactgctctttgaccgctgcttcatggtataatagttgatattggaggaacgaaaatgacattacaagtagaaaatgtaacaggcggttatacacagctacctgttctaaaaaatattgatttttcgatcgcggatggtgaacttgtggggttgatcggtttgaatggtgctggtaaaagtaccacgattaaagaaatcattggtctgctacaacctcacactggaaaaatcactatcaacggactatcgctgaaagaagatccgcaagcgtatcgcaagcagatcggctacattcctgaaacgccttctctttatgaagaattgactttaaaagagcatatcgaagtaacggcaatggcctatgacatccccaaagatgtcgcactgcaacgggcggagcggttattaaaaacatttcgcttggaaaataagttggactggtttccagcaaatttttctaagggaatgaaacaaaaagtcatggttttgtgtgcttttctaattgaaccaagtttgtacatcatcgatgagccttttttgggcttagatccattggcaatcaatgcattgcttgaattgatgaatgagatgaaacaaaccggggcatcgattttaatgtcgacccatatcttggctacagctgagaaatattgtgacaagtttatcctgcttcacaatggcgagattcgagcccaaggaacgctgtcgcaattacaaagccaatttggggctgaaggagcttccctcgatgagttgtacttagcattgacaaaggagagtcagctatgaaggggttcttctcacaacgcttgcaacgacaccagaaacagatgagtcgctatttgcgttatgttttcaatgatcattttgcgatcctcatcacatttctaatgggtggactgggtctatattattcgaattttttaaaaacgctccctcggccgttccctcagggggggatcgtattgctattgatctggttggcacttttgtcagtcggcaagttggcaacattggtgaaaccagcagatttgatttttcttttagctaaagaaaagcagatggcggactatcttgctcaagcactgcgctattcaatgtggctgccttttggggtctcctttttagtcgttggtgcgacgatgcctttagtcgtagtagttactgaacaaacgtttgcgagctttttcttttatttagggacgatttggttattaaaagttacggatctctggttacagcgtttgtctctttatcaaggacaagaacagcgtaacaaccagcgtgttctgtgggtgattgctgcagtaagcagccttttagctagtctgtatgttgcaccttgggttggattgctcttagctgttctacaagctgcttggttcaaccttcagtgtcgtccgacaggtcttctattaggttgggatcgcatgatccacatggaagaaacgagacttcatcgcatttatcggtttatcaacttattcacagatgtacctcaaatcacagcagcagccaaacgccgcaagtatttagatggtctgttgaataggattccttttggacaggaacagacttatcgctatctatatgctcgccgctttttgcgaggggaacaatatagcgggctttttttccgtttgacactgattggtgtattagtgcttttctttgttcaagaatggtggcttagtctagggttaggatgtatgtttctttatttgatcggttttcagctactgccgatgtataatgagtttcagtacatgattttgactcatttatatccaatcgaggaagggcaaaaacagacagccattaattggctattgcttagattattaggcggagctgctttcatttttggtgtagtcggcttgttccgagcggcaattctttggcaaggagtgctagtgctgttgggctttttgttatttacaggactctttttggttttctatgtacctgcccgcttgaaaaaaatgcaaagtcaataaagatggctggacgttactcgaaaaaaccgaacgcatatgcgcttgacgttgactctttaggaagctagaataagagatactgtgaaataaggagagaagctaggatggatattcgcttggatcaagattggcgcctgagaccaatcaaaggcgacaccggcaaagcctacattggcttgaaggacaatgataaagtctttatcaaacgaaatacgaccccgatgcttgcggcactctccaaagaggggattactcctaaacttgtgtggaccaagcgtaccggcaatggcgatacgttgtctgctcaagagtggctagatggacgtgtattggaccccgaagagatcggtcaaagaaatgatgtgattgatgtattgtatcatttgcaccattccaaaacattagcgaagatgctgagcaaaatcggtggtcaagtgatgacaccagaaaaaatgttagttgaatatgaagaaaacttacctaaagcggttgttcaaaatcgctttattgctattgtttatcgttatttaagagagaatattccagaatttcaggaacaaaaggcctccgtcgttcatggggatgtcaattaccgtaattggcttgtttgccaaaactatctgtatttggttgattgggattcgatcatgtttgcggatcccgcaatggatatcggtacgatcttagggcattatgttccattatccagctggccgcattggctagtgcgttacgggattcatggcagcagtgaagtgatcgagaaaatttattggtatgctttattaagtatgcttcaggaagtaaagaagtactaccaacgcggggattataaagcaatgaatgcagagattctgcaattaaaaagaatttatagtgaatgagaagatggagcgaagcaacaagttccatcttgttttttcggaaaggaaacaacatgagagtaagaaaacgtgcgggagcagaagaattagtccaagcgcatcccgaatttgtagtagctgaaccgacagcgtggaaaggccgttggaaggaacgatttggcaatgatcacccattgcatattgaaatcggtatgggaaaaggccgtttcattaccgaaatggctaaagcacatccggaaattaattatattggcatcgaaatgcaaatcagtgtggtttccattgcactggataaactgatcgaacaagatatccctaatgtgcagctgctgcacgttgacggttccgcattgacgaattattttgcggatcatgaagtcgatcaaatctatttgaatttttcagatccttggccaaaaaagaagcatgagaaacgccgactaacatcgaaagcttttttggcagtcgatgaacaaattttacgtccgaatggtgaaattcatttcaaaacggacaatcaaggcttatttgaatattcactcgccagcttttcacaatatggtatggttttaaaacaagtatggttggatcttcatcaaagtgactatgaaggaaatatcatgaccgagtatgaagagaagttttccagccgcggtcaaagaatctaccgggtagaagcccaatttgtggcaccagaagatacgaccaaaagttaaataagcgagtcctagcgttcagactgtagcacaaggcagaaaatgtctttgttctacagtttttttgtatagaaaagtaaaagctgcgtatctctttttaggagggtgacaatggacatttgtacattttcagatgagttggtggagtatgcgaaggtgcagaaaatgcaagatctatccatactgccaacagtcgaagggatgactctgattttcagcaaaagttactatcggcaaatgtatcgcaaagttactacagaagacgcgcaacaattgatcactcgattcaaatttctgggcggtatggaagtaggagaaaaacgaagagcgcaattaggggctatcagctatcctttggcagatggagagcagcgtatccgggtttcgactgttggggattttcaaggtcaagaaagtttagttctacgttttttgcaccctttaggtaagttccatcgattctttatgaatgaacaatatgaaacgatcgcagatgcatgccgctatcgagggctctatctcttttctggtcctactggatcggggaaatccacactgatgtatcgcttagcttcagctgcagcaggtcaggtgatcacgatcgaagacccggttgagatcgttgagcctcgttttttacagttgcagaccaatccaatgatcggccaggattatgatgagctgattcgtttgtcgttgcggcatcgacctgagctattgctgattggtgagatccgcaacaaagagacggccaaggctgcgatccgtgcggcactgacaggacatcgggtttttgcgacgatccatgcacggggattaacggaaacaattgcgcgattgcaagagctgacagaggaagcagctgtgatcgaccaatgcctccaaggaatcacttatcagcgcttactgccagatcttcacggagtccctcacgcattgatggcctacaccttttatgaaccccacaaatcctcaatgacttgggatcaagcactaacaaggatcagagaaaaggagcagatcacccatgaagtttttgacaaggaaaagtaaacggctttcccgcaaacagacccacgccttattagccacatttacggttttattagagagtggtttctcattacaagagagtttgcttgttctacttcgcagtggccaatttgatccgaatacagtaaaagatattgatcagcgactgaaacaaggtcaacgactcagacaggccttttctttgctgtatttatctgaagccgaacaaaatcagctggacttggcagagacccatggcaatctggtggatacgttgcagcgaatggtcgcttaccagatccttttggaaaaacaaaatcagacattacaaaaagtgttggcgtatccccttctattgctggtatttgtctttaccgctctctttgccatgcgtcggtttctattgcctcaacttctggcctccggtatgatcgatgcgaatcattggggcattctctttattacggcagcaccatggatcggtgcggtcattgtaggcggattgggaggtttcgttcttgttgtaagaggaatctttgccaagcagacagcgttgaagcgagccacttttttgagtcgattgccttttttgggagacttgtatcgctgctatcaaactagttattttgcattagagtggggaaaattgtttcagcaaggcttggaaattcgtcagatcattatgtgcatgcaacaaacaagtacagcaacattagtacaagaactagctgttcaattagagctgtgcttggcaagtggcggattgttgccggacaaattaaaggactatgtatttttgacgccagagttttcattgattgtgttccagggcgaaatgcgtgggaaattaggagaagaattgtttgtttatagtcagcttttgacagatcggcttttccaacaaatcgagaagaaaatccagtggattcaaccagtcatttttttattagtggcccttctgatcgtgggtgtttatgctgcaatgtttttgccgatttacggcaatattcaaggagtgatcgaatgagaaaattgaagcatcaagggttcacattggtggagatgctgattgtactgttagtgatcagtattttgattttattgtttgtaccaaacttatccgcacaacgtacagtgatagatgagaaaggaaatgcggcaatcgtcaaagtcgtagaaacccagattgagttgttccagcttaatgagaatcgaacacctactcgacaagaattactagctggaaattatgtaacggaggagcagtatgcgatttaccttgcccatcggaacgaatagcagtttttttacttggcggggatttacaatggtggagagtttgattgtcctcttagtcgtttcgattttcatctttcttccgctaatagctatcgaccgttaccaagcatattttgaagtgtgggggttttgtgctcgtttggaaaaaggattggcagtagcacaacaaacagcgattattgatgctcgcgaaacgaaagtcgcttattctgattcaccagttcctacgatatattttcattcgacgatcacaggtgaaatcaaaatggagccacttgaagtaccctcgcagctcgcagtacgtgtttttcctgtacttacattcaccagtcaatctggcaattatacgcggatggaaacattacggtttgaatggatggaccaagaaaaaaagattacctacaaatttctttttggaagtggacgatatgataagatcatcgaataaaggatatatcatgctagaaagtatcattggctttggtttgctgacgacgagtgtcttcctttttctgactgtccagacccatattttacagcaaagtgcacagttacaggcccaggtggctgctattcgggtattgtatgaagaagtccaatgccaagcatttgaacaggaagtcgtttattcgacacaacgtacagagtcgtatcagttgtctttcggtttcaagcgtgaccgaagctatggacggattgtaagaggtcctcttatcatggagatcaactatgaagagtaagggttttactttgttggaatgtttgctgtctttaatgatcttaggactcagtgtgttgttgatcaacggaatcattcgccagatgcctcaagttaatcaacagctttttgctcgcaaagaccaagaatggcagatatttttgattcagttagaaagggagcttcaaacgtgtacgtatgtttcagtgggtccgtatacactttttttaaaaagcagcaaagaaaatgtagtcacgatcgatcgaatcaatgggaaagtccgtaaaagagacaataatggctaccatccgttattgacggaagtatcattgatttactttgaaaaaaaggcatcctcgatccagtttacagtgactttcgagaatggagaggtgagaattggtcaatggcagattcctgcataagggcggtatctttttgtcagcaatgatgctgattcatttgctgagccttatgttgctaacggttttagaaaatactcggacaactactgatttctatattaagactcttcacatgtatgaggcacgaatcatgaaagaactttttttggcggattatcagcggttaacctatgccgagcagggcagtgtcaactacaatgtagggagggtcatttacgaacaaaaagaagagctgttgttgattcaatgtgtcgtcaatcagcgcaccttccgttttaccgaaattttgtcaggtgatttggaaaaaatagcaacagatcttgagtaactataatacagaaaaaggcacagacatactgtgtcttttttctgtataaaagagttgaaaagtatgtttgtctcttcacaaattattctgaaagatagcgattgattattttggctgaatcagctaaaattaaacaggtatgtatgttgttatagttttgaaaagaggtgcaagatgtccccagaaaaaatggaagagtcttttcatttatcgctagaagcgattcaagtgctccaaaacgcattagaaacatcttatttggatgcatatatcgagacgatcgagaattttattgatcagtatcgcgtacgggtgatcgacggagtacctagtgaagcggatgctcaacggttggaagcgatttataaaaaattagagcagatacccttaacagcagaagaacggcgtaaacttgctcaactacttctgttaaagggcggacaaaccgaacatctgcagcctaatcatcagctgacaccagatagtatcggttttttgtttgtgtatttgatcgagcaattgacaccagcgaagcaacaaaccaagattctggacctttcggttggaatggggaatcttgtcttaacgctcttgctcaatttgcagttagcgcaaagagatgtgcaagcaacaggtgttgacattgatgaaacattactgagtgttgctgcagctacaagcgaatggactcaagccccgctgcatttgtttcatcaagacgggttgcaagaattgttaatcgaccccatggacattgctgttagtgatttgccagtcggctattatccacaagatgaaaaagcagcatcgtttcttacttcagctcccgaaggcgaaggacatagctttgcccaccatttattgatggaacaagcaatgaactatgtgaaagaagatggctatggactattcttagctccggctaatttcatggaaactgaacaaagcgattatttgaagaaatggctcaatgaaaaagtttatctgcaaggaatcattcaattgccagacgagcttttcaaaaatgagcgatcaagaaaaagtattgtgctgattcaaaatcatggtgcaacgagcaagcaagcaccagtgttacttgctaaactcgcatctctcaaggaaccaaaaaacatcaagaaatttttcgaacaatttgaagcttggaaagcatcaaatttgtaatataaatcggataaggagaaaattatgtctaaaacaattgcaatcaatgctggaagttcaagtctaaaatggcagttatatcaaatgccagaagaaacggtggtcgctaaagggatcgttgaacgtatcggattaaaagattcgatttttaccatcaaatatggggaagatcaaaaattcgaacaaatcatcgacatcaatgatcatgaagtcgcagtaaaaatgcttttggatcaattgatcgaattgaacatcttaggttcatatgatgaaatcactggtgttggtcaccgtgtcgttcatggaggagaagacttcccggattctgttgtgatcacagatgaagtgatggaacgcattgaagcattggcagagtttgcaccattgcataatccagccaacttgatggggatcactgctttcaagaagatcttaccagatatcattagtgttgctgttttcgatacttctttccacgcaaccatgccaaaacacaactacttgtacagtctgccattggcttactacaacgactataaagtacgtaaatatggtttccatggtacaagccaccgttatgtgtcagaacgtgcggctgaaatgttaggcaaaccgattgaagatttgaaaatcattacttgtcatttaggaaatggcgcatcgatcactgcagttgatggtggaaaatctgttgatacatcaatgggcttcacaccacttgcaggagtgacgatgggtactcgttctggtgatatcgacccagctgtattgccttatttaatggaaaaattagacctatcgatcgatgaaatgatcgatgttttgaacaaaaaatctggtttgttaggactttccggtatttctagcgatatgcgggatcttgaagctaattatgacaaagaagaagtaaaagttgcgtatgatgtctttactgaccgcattcgtaaatatatcggtggctatgtaacaacaatgaacggtgttgatgcaatcgtctttactgctggtatcggtgagaacgatgcccatgtccgcagtgaggttatcaaaggaatgacttggtttggttgtgaacttgatgaagaacaaaatgccaaacgcggcgaagagttagtcatttctacagaagattctaaagtgaaagtcttgttgattccaacagacgaagaattaatgattgctcgcgacgtggaacgtttgcgcggttaattgtcggagatcaattggaacaaatgagtttcattatttgaataaaaaaagtgttaagccttggcttaacacttttttgttttgaacagctgtacaccttggataccaatgaataatgcttgaaagttgcaaatttggttagcgctattcttatttttctttatattttcagaaaatccaacggtggaactcaaaacttatctagccattttctcatagcttttttgactttggttccatttcgttgtcagaggttgcttggtttaccagcaatccgtccgcaaaggcggccacgtcttcgccagttacttgaagaacacttttttcttgttgcgcattgtcttcaaacaaatccaacagatcaacgagtggttggaaatcgctggcaagatttactggatcaactttcataaagtacttttggatttctttatagacgattcgataatcattcggcaactgatttgcccgtttttgcagagcacgccattcttttttaccttctaatgcttcttttattcccatcttcatccctcactttagttttttggtcacttgattcaagtgttctcgcaatttgtctcgctcatttttggcaccagctgcttcagcgatttctgagatgaaggtagtcatattttcaccgatcacgctattgatcggcagtttttctgcggcactttcttcaaaaagaccgacgatcccttccaagatagggtacagatttcttccagaaaaatcactgtagctccagatcttttgattgtgttcgcgccacgcatcttggtagccagcgggtaacttatcaatacgaagttgaaattctttttgttgcttattcatgtcgttacctgttattttgtcataaaagttcatggtgggcctcctaattaataaatagttgtttgtagcgtttcattgacagaaaagagaaaaaacttagtaatagggctagccacaaaagggtcaagaggctactttgggaaccaaaagagaatgtaccagcaagcaaattctttgtcgtttcgataatgggcgtcattggctggttctcagcaaataggcgcacaggttttgccattccagcgactggcacaaaggctggactgataaaaagcaggaagatcaaaatatacgaaaaggctcctgctccagcataatcttttgctgttaacgagaaggggatagctagcacagtgagactaacggcaaaaagtacgatcaaaagggtgaaaagcaggaagtcaccaatcgttgcttgtggtcgataacccaatactagtccgatcagcagtacagaaagtacagaaataagcataaaaattgttgaggcgacaatgtgcgatcctagaatcacccaacgtttcattggcatagataataatcgcgtcaggaatccttttgttttatcattgttgatcctcaaagcagtgtaagccgatcccattgccatagacatcagcaaaaatcctgacataacgtagctaagataatctgaaggctctcctgcagtgcccccgactaaaatattgccaccaatgacataaacgaaaaaaagtaagatgaaaataggcataacgatacttgtaatgatcgtatcgacacttgttaaattttgtctaacgatgcggttcgttaatgtgaaaagttgcttgattgtcttcattttttagtcctcctttccagtagcatccaagaatatttcttccaaactaagttcaatcggagcagttgttagaatgtcaatatcattttgcaagagtttcatcatcgactcttttaaatcatttctagcaagaataatggtgtcattttcaaccatatagtgaatcgcagattcgtttagaagagaagtcgcttgatcgatcactttttttggaacgatgactttgtgcagatctcttgcttgctttttcaattcttgtggtgtgccaatcaatgaaatcttcccatcgttgataaaagcgattcgatcagctaaacggtctgcttcatcaaggtattgagttgtcagaaagatcgtctttccttctgctttaagttgaaggattagttgccaaatctctaatctgttttttggatccacaccagtagttggctcatcaagaaacaaaatttctttgtcaggaagcagagagactgcaatatctagtcgtcgcttcattcctccagaataggtagcgacttttttatagagaaaatctgctaaatgaagtcgttctgatatggtatctattttcctgcgaagatgagggatgtccaacagcgtgccaattaatttcaaattttcaaaaccggtaaattcatcatctagtgtgatcgattgactattcaagctgatgacatcccgcacttgatcggagtcatttcgtaggtctaaccctaaaattgttgcattgccggatgtagggctagcgagtgtagttagaatattgatcagtgttgactttccagcaccattttctccaagtaaagtaaagatttcgcctcttttgatttcaagagtaattccttttaatacgtcaagatcaccataggtttttgtaagatgatccacagtgatggctttcatagttatccctcattcctgattgaaaagtgtctcgtgcttgattttatctagctgatctacaagaaacgtccatttactccagaaatcttggaggtaaatttccccatttgcgttcaaacgataaaacttccttgccggtccaaggtcagatttccttttttcaacagttaccaattcttttttttctaaacggagtaagaccgtatagacggtgccttcgacgatatcttgaaaccctaattcgatcagtgtattcgtgatttcatagccataagtctctttgctgttatggatgacttgaagcacgacaccttctagcacaccttttagtaattcagtcattcctttcacatcgctcatcctctcaaaaaccatttgtctcaatacctagtattactcagtactgctacataataatacttagtagatggactgtcaactattaagtatcattaagcagagatgcaaaaaaagtaacaccttgaaaaaagcttcccgcttagtggcgaatggtactcaggagactggatcctgttaaactgagctttattgtgggctgctctgcaacttcttcgttcgaatctaagtttgcagctaatcatcgaagacagtgattagctgctgctcgccgttgttatcactcttaagaacaagttcaacaagataggctctgatttgatgaattgtgttcagtaaagagaaataggacttcggtaccgatcatggtgtgaatcattgacatgaaatgttagacatcgattgagaagggagcaaaaaaaatcgagatttattgggctctgttatgaaactaaggattgtttcgttagggaatgccgctgatacataggcgcccaatgcacttgatttgactgagacagtaagcaagcctagactaaaagaggaaagctcacaattgctgctctttatgcccagtcggtggaaatgttctgccagatgttgagagaggctgtgtcctgctaaataacaaagaacattgaataaaaaatcgtctgattcagcatataagtgtatgaataaacattgatgtgatgaatcaggttatttttattaacaaattcttgaatctagaataaaaaaacggtaaaaataattttaatcgataaaaaatgttatttaattaacgtacaattttttaggttgttagatcagtgatttcctagtatctagtaaaaaactctcattttcgactcagcatatcgccattttacaaaacataatctaagcaaaataaccttgtaaaggaagccaaacgggaataaactggcatttgtgaattttcagaaaaatttctaaatttgttttttataaggagccagtaagtatggaaaaagaaaagactttcctaggacagccgcgagggttgtcgacactatttttcactgagatgtgggaacgattcagctactatggcatgcgggccatcttagtttactttatgtatgatgctgtaacaaatggtggcttaggcctgcctaaatcaacggctgtagcgatcatgtcaatctacggttcactcgtttatatgtctagtatcgttggcggatggatctctgaccgcttattaggatcgaacaaatccgttttttatggcgggatccttattatgtttggacatattgttctggcagcgcctcttggtattgctgcactatttgtttctatgatgttgatcgttattggaacaggtttgttgaagtccaatgtgtcagggatggtcggccacttatattcgaaagaagatgtgcgccgagatgcaggattttcaatcttttatatggggatcaatattggtggacttttagcaccgatcattgtgggtattttaggacaaaacgtcaattaccatttaggtttttcaatagcagctatcggaatgttcattggtttggtgcaatattatgttcaagggacgacaacgttgaaagatgttgcaacgacaccaactaatccattatctgcgcaagagaaaaaaatctttttccgtaacgttatcatcgtactagtgcttgtagcagtggttttcggcggtgcagctgcgatgggctatctgaccgttgatttctttatcaattgcatcagtatcttaggaatatttttgccgatctactactttactaaaatgttgcgttctcgtgatgtgacaccggatgaaaagaaaaaagttttagcgtatattcctttgttcttatctgcaatcgttttttggtccctagaagaacaagggtcatcaatattggcactttttgcggccgatcggacacaagatacgttgtttgggatcacgattccggcgagtctttatcaaacactaaatccattgtttgtcgtgctgttgacaccggtatttgtttggttgtggacgaaacttggcaataaacaacctagaacggaagtgaaatttgcaattggtttgattttagcaggtttgtcttttgtcttgttgatgttcccaagtatgctgttcggagtcaatcaacgggtaagcccattgtggctagtctttagtttctttatcatgattgctggcgaaatgtgtctgtcaccagttggattgtctgtaacgaccaaattagcaccaaaagccttcgaagcgcaaactcttgctatttggctattagcagatgcttcttcgcaagcgatcaatgctcaaattgctcgtttctatacaccgcaaacagaaggggcttattatggcattgtcggtggtgttgcagtagtcgtagggattattctttacatggcaagaaaaccgattcgtaagctgattgggaatattcactaatcaacggacttgatcttgaaaaagatcaagtctttttttgcacttttagtcaagttatgagaaaataaatgggaacatatgttccgtaggaggggttaaatgcacacgcgacgctataaaacgattctttcaccaaacaatacaatgaatctctatcgagggtgtacacatgactgtatttattgtgatagtcgcagcagctgctatcagatggcgcatcggtttgaagatatcgagatcaaagaagcagcaataacgattttggaccagcaattaaagaagcgccgacagccttgcatgatcgttaccggtgctatgtcagatccttacgttcatgcagaacagcgtttgagacaaacgaggcaagcactggaagtaatcaaaaagaacggttttggtgtcgcgcttttgaccaaatcaacgcgtgtgttggaagatttggatttgctgatagaaatcaaccagcaaacgaaagcagttgttcaaatgactctgacgacttatgatgaagcactatgtaaaaaattagaacgacaagtcgctaccacttatcatcgttttttggcgcttaagaggtttcaagcagcagggattcctactgttgtttggttatcacctattcttccttttatcaatgacagcgaggagaatctgttgtgggttttggactactgtcgccaagcgggagtgaaaggcatcatctgttttggatttggggtgacgatgcgggaagaaaatcgcgcatacttttatcagcaactagaccgtgattttcctggtatgaaggaaaagtatcagcaagcttttggcgatcggtatgtttgcgacagtccgaatcagcaaaagctaatggctattttttgtgcattctgccaaacctatcaaatcctttatcgaccagaagaagtctttgcctatatccatcgttttgaagaccagcagttgacactcttttaattcgcgtcttttaaacaaatgaaatagccgcaaggactgagagtgttccagtgtacgagcaacacctcgtcaccctgtcacgaggtgtgccagttctcttatcctgcggctatttttatttgatttttctgatatgcgattccttatggtgaaaaaaacgaacgtggtcttcttaaagagcctgccagtcgatgggctgccgcatgacctgctggtcgcggatcaacagcatgtcttggaaagtttgttttagaaaatagcggtcatggctcacagcaattaacgtaccaccaaagcgctgaatcaattcttcaatttcttcacgagcatagatatccaaatgattggtaggctcatctaatagcaggacgttgatttttttatgaaaaagtttcagcagataaaggcgaatcttctcaccgccagaaagatcctgaatgcgttttgagacatcatcctgataaaaaccgatttgtgccagttgttgtcgtgcagattgttcattgcctatgaactgataggcaaaggataggacccgcatagcgggattagaaaatgagagcttttgaggcagatacccgatctgcagattactgccggatttgatcgttcccgcgtcaagcgccaaagtacctaacaaaagctgaatcaaggtcgtcttaccggtgccattttcaccaatgatcgctaagcgctcaccacggtaaatcgagaaactactgtcttcaaagagtagccgatcagccatgactttaccgatatttcgggcgataaagacttctctgcctgttcgatcactttgattgactgtgcgtatcctttttttaggaggcagcgggggcttaacgagagtgatcttcgctaaacgcttttcaatttctttggctttacggaaaaagtcctcattgtccccttcattcccccattggcgataacggcgaatcatcgctttaagccgctggcattctttttgctgcagctcatagttcttagtcagttctgcgattcgagcttgtttcaatgaacgatattggctatagtttcccggataagaaatcaattgaccatcttcgatctcacagatcctagtcgtcactttgtccagaaaagcgcggtcatgagagatgacgatatacgcttttttcgtattgataagatagttttccagccaatgaagactagctaaatcaagatgattcgtgggctcatccagtaaaagcaagtcatgctctgtcaacagcaatcttgctagttctactttgactcgctccccaccacttaacgcctgcaaagaagtttcttgcaactgcgctattcccaatcctcttaaactagcaagaatccggtcttctaacagatagccaccgagttcttcaaattgtagctgtaattgtccatagcggtccaataatttcgataagtcagcgtcaggatcgctcatctgttgttcacaacgtcgcatcttgcgacttatctcttgcagtcggggggaagaggtttgtaaatacgtcagcaccgtttctgaagagggcgaaaattcttgtgccaaatgaccaatagaaagacttttacgtcggctgatcgttccagtatcatttttctcggtcccgagtaataaatctaataatgttgtcttaccagagccattgatgccgattaaaccaatcttttcaccgggatcaatttggaaagttaattgttcaaatagcggggtaccgccaaaatttttactgattttatttgcttgaattagcatgatctcactccttgagaccactcaaaaaggccatggaaatccatggcctgcgttatttttatctgatgttgttcgagataaacaccttgagatggccattgattttacgaatattcaactgttttagacagactcgtccctaaaacggtttttgtaaaaccaattgcatggctaaatgcgatatggtaacgctgataattgacgttacatgttattttagtcatgcgcatcatggtgtttcctccttttgcttatttgccaatagtgtaccgcaagtgaccttactttgcaattagtcagttagttttttcttgactggaacaatttcagaaaggttacttgccttcggttgcccaatcactaatggaacggtctcatggaccacgtcactgtaagtgagtccaaaccaacgttccggagaaatagtatgccgtttgataaagagtttggttaacattacttgccgctcccatcgggttaatgaggtgacattcgacaactcttcttcgattagaacaaactggaagtcgccaacttgacgtcccggggtcaatgagtatttttgcggctgttttggtaagcgaccatccttcatcaattcttgaatgatttgtcggatgtagacattgacttcttgagaaacccgaaaacctaagtagagtttcaattttacgatgaaatctgtctcagccatcgagacttcgtactgttttgtataaggttcatctgtgacttccacattcacaaaccaataaactttggcgcgtttcggccgtttatcaaggatcgaataaataaactgacggccaatcgtatttccttgcagtttaggaactaaaaagacgacattggtctgagaaaatggcaatgtctcatcattccgcaattcctgtagttggggaatgtattcggtcaagtcaacttcttcggcagcttgttcttgaatgtggttgtcccattcccaaatgagcatgatggcgataatcaaagcggccatcaaaaccgcaacgaacccaccgtggaaaaattttgcggcactcgagatgaagaagatgccttcgatagctgcaaaaaataaggtaataaatggagcgataaatcgcgcttttttgaattgacgcaaaaagaaatataacaagactgtggtcatcagcatagttactgtaatcgctaaaccataagcggcctccattcgcgtggatgtccggaataagagaacgacaccggaacaagcgatccacagcatcaggttaagcgcggggatatacatttgtccgatggaagaaccaggatacatgatctgcatccgcggcaacaaacgcaacttgattgcttccgaaactaacgtgaaagatccggaaagtaaagcttgggaggcaatgattgcagccaacgcagaaaagccgacgccaaaaacggtccaaccttgaggcaaagcctggaaaaaagggtttaggttttcaatctgttgataggcaggatcttgataaacctttaataaccaagcagcttgacctaagtaattaagcatcaaacagattttgatgtaaggccagctggcataaatattctttttgcccacatgtcctaaatcggaatatagtgcttcagcaccagtggttgccagaaagatattcccgagaatgaacagacctgaggtgttatcagggctaaacagcagcccgatggcataacgaggatccaacgcacgaatgacagacagatcaccggaaaagttgatcaaaccgacgatccccaaaaaagtaaaccaaccaagcatgatcggtccaaatgctttcccaacgaattctgtcccaaagcgttgcaggctaaaaagaacgaaaaggatcgttaatgtaatccaaacaataatggattgatcattcccaaaatgatcataaaacatcggaatgccccgcaacccttcaatggctgtcgtgacagtgacggcaggagttagtacaccatctgccaataacgcagcgccaccaatgattgccggaatgatcaagtagcggctttgcttacgaacaagtgtgtataaggaaaaaattccgccctcaccgtgattatccgcgttcaaagcgattaagacgtacttaatcgtggtaagcagagtcagagtccaaaaaacgagggagacacttcccaatacaaagtccggggagagtgttttcaacccgccgttgtcttcaacgattgctttcatcacatagagtgggctggtcccgatatctccatagaccacacccatggcgaccaaaaggcctcccgcggttaattttttcattttactcatagattttccctccaaattgaactgcaaaaaagacccaagaggccctttgccacttaggtcttgcaagaaacatcatagaccagcggattcccgcttgctgttgatctatgatcatggaaaaacccatgtgctactcccctaaattgctataattatctttgttttgctgattcctgtcaacttttttcatttaaaatgtaaataaacattttaaattttatgtttattcacgtaaaattacgttaagtcttatttctaagggggatagtaaatgattgaattgaaacatgtaagtaaaacgtacggaacaaaaaaagcattgaaggacctttctttgacgattcagcaaggtgagatctttggttttttaggacataatggtgcgggaaaatcaacgaccatcaagagtctagttagtattttacagccgacgagtggcgaaatcgtttttgatggcaaagcattagcccaataccgagaagaaataaaaaaacagattgcttatgtcccggattcaccggacatgtttttgcagttgaccgccggagaatattgggatttgatcgcagctgcttatgaagtaccggaaacccaaaaaaaggtacgcttaaatgaactgggacagttatttgatatgacgacgcatgcagaagaaacgctagccagtttttcccatggtatgcggcaaaaaaccattctaattggagcattactgccggatccggatatttggatcttagatgagcctttgcagggattagacccgcaggcagcgtttgatctaaaagaaatgatgaaagcacatgctgcgaaaggcaaaacggttattttctcgacgcatgtcttggatactgcccaacagctttgtgatcagttagctattttgaaaaaaggcgaattgctttataacggttctgtcgatgaattgcttgcacaaaatccagatctttctttggaagcgatctatttaaaaatgacaggtagaggcgcggaagagccatcgttgacagaaaatggaggagagttcagatgaacaagcgacagttattgacgttgacaagcgtcaatcttcggtacgccaatccgcaagtcacagataaagcccgtaaaaaaggaaaaagcgggacacaattgactcgttatttgatccaacaatatgtattatcaggtttcgtttttttagtgatttacggtctaacaatgatcgcactggatttcagccgtttgccaggttttttcacttattatgttgctctttttggcgttctaggattttctcaaggaatctcgtccatttttaatgtcttctttgagagtcaagacttgcctgcatatttgccattgcctttccggcaagcagaaattttcaccgccaagattcttgttgtctttttaacagtggcaccatttgtttttccgttatttgtcttatttcttttaacaggaatgcgttcacaggtctttattctgctcacgcttttgttagcgattgtgctctttttattatttctcgtgattgtttttagtatttgtagtttgatcgtttttggattagctcgaacaaaattgtttcgtgaacataaaaaaatgatgaccagcttgttgttgggaatttctatgatcgtagtagtggtagggatcttgatgatgaatcaaaccagttcctacgatacacagatcatggatcgcggggccattgcctttttactgccatttttctatatcatgcacagtccctttgcagttgcaggaatcgggagctttgctattgttctagtggtttgtttgttgctgctaggagcgattcggttctttattttaccgaagttttatgatcaggtggcgatggctgtgcccgaccatggaagcgtgcgacggaagcagaaatccgggcaaggattgtcgcagatgttattcagttataattcccagctggttcgtgatcccaacttgattatgcaagtattgtccacttcactgatgacaccgatcatttttattgtgacatttgcattgagcggtacgtttgatctaggacaaatggatgctcgtttttgtggagtgttctttttggcaggtatcgcattagctgtgatgatggtcaatccaacctcttttatcagtaccttgatttcattggatcagcaaaattttctgtttgttcgttcattgccgttgtctatgaaaaaatatttacaagcaaaattccgatttggcctaatgcttcaaatggttttgactggcgggattgccttattggcgattttgctctttaagatgccgatcctattggcaacgactttctttctaggtacgttacttggttgttacttgctatgcttaaaatattttgcccgtgattatcgcttgcttttgcttgattggaccaatgtcagtcaattgtttacccggggtgccggaagtgtgggaatgatcgtcggtatgatggtggcacttctccttagtattctgttactcgtcggttacggttttgcagcaacgatgattccattttggctcttgaatggtccagtcttgctagttctgttaattggtagcgtgctatggcacaactactatcaaagaaaattttggcagttgattcactgagtctagtcgtcatcaatagcgcatagaaaaagaaatagatttaatcagaaaattcagaaaaaagactttacaagtattcagaaacatgattagataataaataacctattactttgctttcattttttgctggcaagcttgctccacaggcttgttgcaagagactgtgccaaacgtcatagtgattagaaggaaccagaagttgtccgcttcaagaaagacagctgggtcattttgagctgagacggatggcgcagtttttttaatggctaaaactaacaaatcgtgaaaaatagaaaaaaacactctgacaagaacctttttgtcagagtgtttttgtttttgatttgagtatgtgttggttcattcagagattatgcttcctctttttcgttggttgttggcagatgattgtcaaggtctgtccgtacgaccaatacgtcacaagaggcatgacggattacatactcagagactgaaccaataaaaattcgttcgacggcattgagaccagtagcgccgatcatgattaaatcgatttgattatcttctggtaattgtttcgcaatgattggttttggcgaaccgtattcgatgacagtctttactgcagttacttggttcttacgggcatagtcttcataatctttcaatgtttgcttagccatttcagtcgcttgctcagccaacatgccatcaaaggaagaaacagtttgaaaggcacgggtatcgattacatgggctagtaccagttcagaattgttccgttgggccacattgaccgcttttttaaaagctaattctgactcacttgagccatcgactgcaaccatgattcgttgatattgttgtaacatatgaaacactcctctcagataacttcatctttattgtaaaactttttgactaaaaagaaaaacctaattatctatttttttcatcttacgggcaaacagcaaactgaatgaggcagaagtaatcattaacactgctatataaacgagggcaatcaattttttgtctaaaaaagccacgatgattgcaagaatacctaaaacaccatgaagatagccataaatggtcaaaaaagtttgatttttagtattttcaggaataagggaaaagaaaatggcatgttttgttaacagtaagtagcagacgccaaacaacaaaacagcagcaattaaaaataatagaaaaatcatccgtgaaatccgtccttctcttataagatagttttagtatagcgaagtgctaaaggaatagcaaaaagcacaaaaaagccacctgtctaaaacagatggcacattcaataaagaatgggtaatatccgtagatgccgttctttttcccgtagtattgatcccgcaaattctagcaggtgggttccacggtctaagcatcgaactaccaaatgaaaaggcatgttaccagctttgacacaagacggatcccaatatatcaataaaaatgttcggtcaacacacagatgggacaactcgtacatcacagaattcccaccttcatagtagcataggacaacaaaagtagcaataaagaagattgaaaacggtgacaaaaacctttttcgcttccatgaagcggttgctgagggttaggtctgtttttttcgttgctgcaattgttgatatctttgacctagagcttgctcgtattttccggtagcctttggctgataatagtgagcttgcttgattttatcgggtaagtattgctgatcgacccacgcatcatcaaagttgtgcgggtattgataaccgacgcctcggttcaaggcttcagctcctttgtaatgactgtctcttagatgatcagggacatccccggcattgcctgcacgaatatctgcgatggcagcgtctagtgccatataagccgagttggacttaggggatagacaaaggtcgaccacagtatctgctaaagggatcctcgcctcaggtaagcctaatcgttccgctgctaagacagcattgactgttcgagcagctgccgctggattggccaacccgatatcttcataaccgatcaccatcaaacgccggcagatgattgccaaatctcctgcttctaccagacgacccagataatggagtgccgcatcaacatcactgccgcggatcgatttttgaaaagcagagatgacatcataatgggcatcgccatctttgtcatgggtcaatgctttgcgctgaacacactcttcaataattggcaaagtcaaatggattttcccatcagaacttggcggcgtggagcgagcagcgagttctaatccattgagtgcactgcggagatccccattggtcgctcgtgaaagatggagacgagcttcttctgtcaactggatcgattctgttcccaagccacgttctttatcagctaaagccgcatcaatggcggctaaaatatctgattcttgcaatggttttacttcaaaaatctgtgtacgactacggatggctgggttgatagtgatataaggattttcagttgtggccccgatcataatgatttttccgctttctaaatgaggcagtaagaaatcttgctttgttttatccagacgatggacttcatccaaaagtaaaatgactgtgccgctcattttggcttcttcggcgacgatttgaaggtcttttttcgtatcagtcgcagcattcagcatgcggaatgcgtaacgtgtcgaaccggcgattgcactagcgatacttgtttttccggtccctggtggaccatacaggatcatggaagagagcatcttggcctcaaccatccggcgaatgatctttccgggtccaactaaatgctgttgacctacgacttcatcaaggttgcggggacgcatgcggtacgcaagtggttgctgcataataagctcctttcttttttctttagtatatcataagaacgtatattcccataaggaagcgggtattttgctattgaaactagtcagtggcgatagaaaggtcaaacaattgataagatggtcgtaatcaatagtaagttccttgagaattgtgtaaaataaagaaggtgaagaaaatgaatgaaattgaacaattatttgcacaacaatcaacaacagcgattgcccggcaattattagggatgtatctggaacatgagacgcccagtgggaaattaggcggttatatcgtcgactgtgaagcttatttaggaccagaagatctggctgctcatagtttcgggatgcgtaacacgccacgagttcgagcaatgtatgaaaagccgggaacgatttatttatatacgatgcatactcatttgattttgaattttatcacacagcctgaaggcattccccaagggatcatgatccgcggcgtggagcccgtcgaaggaatcgcacaaatggagataaatcgcagtaaatccggtcctgatctctcgaacggacctggaaagctcgtgaaagctttgggaattacgcctgattattatggccattcaatttttacaagtccactgcatcttgtcaacgagaaacggcgaacaccgaaagaaatactcgctgttcccagaatcggtatcccgaataaaggggagtggacccataagccgctgcggtttgtcgtagcaggtaatccatatattaccaacagcagaaaatctgctgtccagccagatcacggctggcaataggaaagaaggaacgtataatggctaaagaaacaatgctgacttatttggacagacaattaacaaaaaaaatccctgagtacgatgttgcccttgattgggatgcaagaaaccataccatcgaacttgttttacgcttatttgcagagaacccgaatcatttgcaggtagatgatgcccaaggagtagcctctgaagaagagatcatcgaatttgaagacggtattttattgtttgatccccaaaagtcttcctttgcagaagaggactttttggcagtcattccctacgcaggcaaaaaaggaatccaaaaagcgttgctggatgctttggttgattacatcaaagagattctgacggagggagaaagtgatttactagattttctaaacgatgagagtgaagaagcggtcttcgaactagttttcgatcaagatcagttgttagaccgtatgaatacttaccaagaaagcgatggggaatcgtatattccttatccaagttattaaggagcagatagatgaaatggaatgaagtgaaagtagctactgcaagtgaagcagttgaagcggtcgccaacattttgatggaacaaggggccagtggtgtagcaatcgaagatgttcttgacattgaaaactttaaaagcgatgcctatggtgaagtgttagacaaagaaacctatacaacgctggatgaaggcgcccaggtaacggcttatttccccgagactatctttttacctgaaattttgccatttattgaggcggcgatcgctcgtttaccggaatatgggttagcaattggcaaaaatgagattacctccagcgaagtagtagaggaagagtgggcgactgcttggaagaaatattatcatccagtacggatcactcgctatttgacgattgttcccagctgggaacaatatgaaacgacggaccctgccgagaaaatcattacgctagatccaggaatggctttcggaactggtacccatccgacgacgcgcttgacgttacaggcgttagaaatgtatttacgaggcgaggaaacggtcctggatgttggaaccggatcaggggttttaagtattgccagccgccacttaggggccaatcaagtatatgcctatgaccttgacgaggtggctgttcgggcggcaaaagaaaatatggcactaaacccagttgccgaagcagtgaatgttgctgccaatgaccttttaacaggtattgaaatcgaagcagacattattgtagcgaatattttagctgatatcatcttactgatgatcccagatgcttggcggttgctgaagcctaccggaacattaattgtttctggaatcatcgaagcgaaaaaacaacttgtgatcgatgccatgacagagcaaggatttgttgttgaccaaatcttgaatcaaaaagattggtatgcgatcgcactaaaaaaaccagagtagggaatgtcatatgcagcgatattttttgaatgaggattatgaggcgaagcctgtttatgtagtagagggagaaccgtttcatcacatggtacgtgtgatgcggatggttccggatgactgtgtctacttggtctttcaagaccaagtagcgatcctcgcgaaaatccagcagatcgatgaacaagcggttcatttgattgaagtagaaaaggaacagcaagacaaagaattaccgattcatgttacgatcgccagcgggtatcctaaaggagataaattggaattgatcgtccaaaaagggacagaattgggtgccgctaaatttatcggttttcccgcccaatcctcggtagttaagtgggaccataagaaactccaaaagaaacagcagcggctgcaaaaaattgcccaagaggctgctgaacaagcgcagcggcaacgagcaccgatcatccaactggctgcttcggacaaagagttgtgggatagtctttcaaactatgactatgtgatcgttgcttatgaggaatctgctaaaagcggcgagaatgccaaactgatcgatattttgtccaaagcagcgcccggcagcaaaatcttagcaattttcggacccgaaggtgggctgacacctgctgaaatcactcgtgctgaatctcaaggtgctgtgatctgtgggttagggccacgtattttgcgaaccgaaaccgccccattttattttttgagtgctgtcagcgtactaactgaattagtaaggaagtgatcaagtgacgcaattcaaagacaagcttagttttcgatttttacaagctggactgacggattggttgttaaaagatacgtttactgaatttaacacacttggtgtccaagaagtcatcgtgttgcctagtgatttgcgcagagcgaagcagttaactgaaggctccgagatccaagtcggctgtgcagttgattttcccttggcacaaggaacaatcgctaagaaagcttttgagatcggtcattcctttatggatggcgctgattttttagaagtctggctaccagcggctttgttggtggaaaaagagcggacggctgatctggcggagttaatggagacaagccggtcactggctttgtctggtggtgagatccgctgggctgtcaatacttcacttatgaatgagttgacaaagatccaagtagcacagcgtttgaaagcatgggactggcctagtattactcttggtcagcagttaactgtttcagatgcgttgcatgatgtctcgatttttgctttagatggaggaccgcaactgacgatccaagtcaacacggcagcgtctgttacggatcagaaatcacttgcagaacttttacaggcaggggcggcaaaaatcggcgtgccctttacagagtcagcgttactgttgaatgaataaaccggtattttgtctcgcttgaccagaatagagagaattgaaaaaaacaagaaaaatttgtataatgacactaatcataaaagaagatggccaggcagaagcgcattgcttcaagagttctgctattcagagagttggggatagcagaattctttagaagcggcttctgtcttgctttttgaaaataggaaaaaaggaggcgcgtttcatggcaaaagaagtgatattatccggacctggtgtgatcaagctcgtggcccattatatgagtgaagaacatgttgcatttgtacagaaagctttagattatgcgacagaagcccacaaagatcagtttcgcaagtccggcgagccttacatcatccatcctattcaagtagcagggattttagcggaactacaaatggatcctcatacagtcgccactggttttttacatgatgtggtagaagatacggaagtgaccctagcagatctaaaagaagtctttggtgcagatgtagcgatgctggtcgatggtgtgacaaaattagggaaaatcaaatacaaatcccatgaagaacagctagcagagaatcatcgcaaaatgctgatcgcgatggctcaagatttgcgcgtgatcatggtcaaattagcggaccgcttacataatatgcgtacattgaaacacctgcgggaagacaaacaacggcgaatcgcccaagaaacgatggagatttatgcaccattggcgcatcgtttagggatcagccgtatcaagtgggagctagaagatatttcactacgttatttgaatccacaacaatattatcggatcgttcacttgatgcaaaccaagcgggaagaacgggaagcttatgtgtcggaaaccgttgaacagattcgacttgcaactgaagaactagatatttttgctgagatctatggtcgtccgaaacatatctactccatttaccgcaaaatgaaagaccagaagaaacaattcaatgaaatctatgatcttttggctattcgggtaatcgttgattcaatcaaagattgttatgctgttttaggaacgatccacacaaaatggaaaccaatgccaggtcgatttaaagattacattgcgatgcctaaagcgaatatgtatcagtcactacatacgacagtgatcggtcccaaaggcaatccagtagaaatccagattcgtacccatgagatgcatgagattgctgaattcggggttgctgctcactgggcatataaagagggtagaaccgagaaagtcaaagcagacaaaatgacccagcaagtcggttggttccgcgaaattttggaactccaggatgaaagctacgatgcttctgaatttatggaaggtgtcaaaggggacattttcagtgacaaagtatatgtattcacaccgaaaggcgatgtcacagaattgcctcaaggttcaagtccgctggattttgcctacagtattcataccgatatcgggaacaaaaccactggtgcaaaagtgaatggcaagatggtccagttggattacaaattgaaaaatggcgatatcattgaaattttgacatcaccaaattcattcggaccaagccgcgactggatcaagcttgtagctaccagcaaagctaaaaacaagatcaaacgttttttcaaggcccaagatcgtgacgaaaacatcatcaaagggcacgaagcagtggtcaaaacattgcaagacatgggctttgtaccaaaagaatttttaacgaaaagcaagatggcagaagcctgcgaacgatttaattatcaaacagaagatgatttatttgcttctgtcggttttggcgaagtgagtccaactacactggccaatcgtttgacggaagaagaacgccgtgagaagcagatcgaaaaacaaaaacaacaagtacaagacatgatcaatcagccagcgaagaaagaaccagagaaaatgaaagtccgccatgaaggcgggatcgtgatcgaaggcgtggacaacttactgatccgaatctctcgttgctgtaatccagttcctggtgatgccattgtcgggtatatcacgaagggccgcggcatctcgatccatcgcagtgactgtccgaatgtccaaagcaaagagatcgtcaatcgtctaatcgatgtcgagtgggaagatacttctaacagcggcaaagaatacgatgcagatctggaaatctatggttatgatcgttccggattgttgaatgatgtcttgcaaacagtcaacgctgttactaaacgattggtcagtgtggaagcgaaaaccaacaaagacaagatggccaccattagaatcacggtctcaattcagaacctaacacatcttaagtcaattgtggacaaaatcaaacaaatcccagaagtatatagtgtcagaagaacaaaggggtgagacgcgagacatgcgagcagtcattcaacgtgtaagtgaagccagtgttgcaatcgatggaactactgtaggagcaatccaaaaaggttttttagttctcttgggaatcactcatgaagatagccaagaagatgtggattacttggttcgaaaaatcaaaaatttgcgggtgtttgaagatgaagcgggaaaaatgaatcaatcgattgaagcaatcgaaggtgctattttgagtatctcgcaattcacattgtatggcgagaccaaaaaaggaaaccgtccaagctttattcaagctgccagacctgaagtggctacaccattgtacgaagctttcaatgcgggtctgcacgctgcaggtatcgaagtggctacgggtcgctttggcgcagacatgcaagtgtcattaatcaatgacggtcctgtaacgatcctgatcgatacgaaggaaaaataggctgcgttcacaacgactgcctatccaacatgccaaaagaaccaaagcaaatagtttaaagaggactgccaacatgcaagttggtagtctttttttagtggaaataagtccatcttgtagcacttctggtaccaacccttttgtctttggactatcttacaaaactgtaagatagttctttctgatcagaaatagttatttaagagctgaatctattccttttcgtaatggtagcagttacaaaaaagttatttatttttatccatccctaaaaaactttcaataaattagattgtccttaaagcgcaaatgtgaaataatagttaaaaaataatgtcactggaggaaatgacaatgaatttttggcagcgtgcattaaaaagtgttactcgcaggaaagggaagtcgtttattttatttttagtcatctttattttaggtaacgtgatcgcaggtgcggtagctgtgcagcagtctactatgaatgtggaacgggaaacgaaaaagaaaatgggcaacgttgctacagtcgagtttgattatgagcagtttgagaaagacaattcaggaaaatcagatgaggaagtttattctgaagaaaatagtccgaaaacgccaaaaacggcggactatgacaaagtgggagaattagattacgtcaaatattacgactataccatgatgggttggttagagaccaagaaattcaaagcctatacaccagaagatgaatcttttggcatggcgggcggcaattattttaatttaaagggcggcaatcgaccacagccattagatatggaagaaggcaacatcaagctgatcgatggagaagtgtttagtgaaaaagacttgtcagaaaccactaactcgattttgattagtaaagaagtcgctgaaaaaaataatttgtcggttggcgatcaatttgtttgggatatgtatagtgaagtccctcaagatccgatgggtgacagtgatgatagtacggctacttcagatgatgaagatgcagagagtgaaagtgcagaaatccaaacaaaagttgtcacagctgattatcctgtcaaaattgcagggatttttagtgtagttaaaaaggaatcggccaatagtaatccttcgcaagaagaaaaatccaatcaaatctggcaagctgttgaacagatcaatacgatttatgctgccaatcagttggtgaaagattttagtaaattccaaaacgaaaaattgtggggagatacggtaatggccgaagatacggaggccgaaccggaagagtattatcaagcgatgtatgttttgaactctaccgacgatgttgaagcattcaaacaagaagccaatccattattaccagattactatcatgtggtagcttccacagatcaatacgatcagattgccggaggaatgaatcgtctgggaacgatttcccgctatatcgtgattgttgctgctattgctacggtctttatcatttcattagtcgttctattgtttttgcgagaccgcaagcaggaattagggatctatctatctttaggagaaggccgtgggaaagtgattgggcaaatcgttattgaagtggtgctcgtcagcttagtcgctctaatctgctcattggtgacgggaaatctattaggaagtgcggtttctcaaacattgatgcaaagtgactggatgacgaatctgtcccaaacggatacctattccatttcaagcacaatgatgacaaatactctcagctatgcggatgtccaaagtgcttataaagtcactttttctatggggtatgtcatcacctatcttttattgggattaggtacagtcttattgtctgcaatcttgccgttgttgtatattctacggctgaatccaaagaaaatcatgatgtagggggaagaaaaaatggctttgttggaaacaaaagaagtagattactattatcaagatggcgatcagcggcgctatattttgaaagaaacatcggtggcgtttgaaaaaggcaagttttatgccattttaggacagtcagggtcaggaaaaaccacatttctctctttgatcagtgcgttggatacacctaaaagtggcgctgttttctttaatggagaagatattcaaaaaatcggacatgagaaatatcgccgagacgatatcagtatcatctttcaaagttacaatttgattccttacctgtctgcggtagaaaatgttctagtcccaatgtcgatcacggataatcaattgccggagaaccagcgggaagtcgcatacaatttattggactatattgggatcacgaaagaaaaagcagatcgtttagtcaatcagttgtctggtggggaacagcaacgggtggcaatagctcgtgcactggcgacgaatgttgatattattttggcagacgaaccaacgggtaatttagatgaagaaatggaacaggaaatcatcgatatttttaaagatttggctcatatgcataacaaatgtgtgattgttgtgacccatgcgaatgaaatcgcccaacaagcagacgaagtactctatttgcgtaaaggtgtgttgaataaagatgagtgattttttatcaaatttcagtcctggtaattacgatggcaagaagcaaagctctcctaaagaaactgagtttgacgaaaaaacagagcgtaaagcagaaccaattccagattctcagacatctgatcagggcgcaggagagagtaaagctgcagcagcatcggatccgaaggaaatgaagcgaagaacgcgcaaggaaactagctcttctcaaccggtcagtcggttcggaaaagaagagacagagtttgatccaacttatcgcaagcggcagcgtaaaaaatacgcgctgatcgctggtgctgtcattgtgctgattgccatcagcagtgtggtgtattatcaattgactcatgtgaaggttcctgattttgctaagaaagatttatccgaagcccgaacatggggcatggaagaaggcgtggcgatcaaagtcgatcaagtgtatgattttgaggtagagaccaatcgaatcgttagtcaaagtgttgctgcagatcagaagatcaaaaaaggcaagactttgacagtcaaagcaagcctaggtcctgacccagaagaaatgatcgagctgcccgacttttcgtcactgactaccgaagcggcaaaagaatggatcgagaaacaaaaggcagaaaatatctcgttgatcgaacagtatgacgacaaagtcgaagcaggtgtattcatcaaacaagaagcagcaaataaagagcaagatctcaaagcttataagcgcaaagatcgcttaagcatctattattcaaaaggaaaagaagtcttcgagaagaacatcgaagttactgattttacagggaaaaacaaaggtgaagctcaagagtgggctaagaaaaatgaattgaagtacaaagaagaagctgttttttctgatacagttgctctagacgtcgtggtttcccaagaaccagtcaaaggcagcaaattggccaaaaaggatcaatttcttgtcaaagtttctaaagggaaagcattagttgttcctgatttctcacagtataccatcgagcaggcagaggggctagaatcgaagataccgattcaagtcaagacagtttattctgatcaaatcggttatggcaatttcatcagtcagtcggaagaggcgggcaaagaatatagtgacagcgatacattgccaacagtgaaagtggtttattcactggggcaaccgtatttgaaggatatccggcaccaagcaacggaaggcgatctgccaaaaatgttctttgatgagtacaaatcgaaaggtgcttctgtatattatgatgtctactatgtagattcagcagaaccaaaaggaacagttgtggagatgagtcgttatggtgaatttattccattggaagtatcgatcaccatcgggattagtcgcggaaatctgcaaggcgagaccgaatcattaccggtcagtcctgagacagaaaatgtaaaggatccgctagaaacagtcaacagtgccactaccgaatgagacatttagcaatcgggcccgtaacaaagctacagaacccaagcaataagtgagtgaactatctaaatgaagtgtgtcttctgtttgtcgacaatgacagactgaaacagaaggatctacctgcatttagatagtttttctttttttttacttggattttgaaaaatggagagagtttttttgttatcaagtaatcacaggttttcaagcatgcatgcttgaaaaccttttatcgatacggtacagttgaattgataaccagtcaataagcagtattttacatagagaagggacgaaagaaatgatcaaaaaattactagcaaatgttggcgattataaaaaagccagcctattgacaccggtctatgttgccggcgaagtggcgctagatgtcattatgccactgatcatggcaatgatgatcgaccaaggaattgaaaaaggacacgcgggcgtcattttgcgctatggcggtctgctttttttgtgctcattattggcactgatgctaggaactttaggaggacgaacagctgcgattgcttctgccggttttgctcgaaatcttcgccacaatctttttagcaagattcaggatttttctttttccaatatcgaccgtttttcttcctctagtttgatcacgagaatgaccaccgatgtgactaatgtgcaaaatgcttaccaaatgattatccgaatcttggtgcgcagtccattgattctggttttctcactgatcatggttagcacgatcagtccagaattgatgctggtttacctagtcgtcttgccaattctagccatcggacttgctttagtgattcgctttgctcatccgcttttcttgaaagtatttcggatctatgaccgtttgaacaacgtagtccaagaaaatcttcaaggaatccgtgtggtcaagtcctacgtcagagaagagcagcaagaagaactttttgacgaggtgtcaaatgatgtctaccgcaactttacgctagcacaacgaatcgtctcgttcaatatgcctttgatgcaattctcgatctatagctgtatgttgctgttgtcttggttcggtgcccaactgatcgttgagcacagcagcttgacgacaggggaactggttagcatgttcaactatactatgcagatcttgatgagtttgatgatgatgtcaatggcatttgttcagattctgattgctcgtacttccgcacagcgggtggtggaagttttggatgaagaaagcgacttgaaaaatccggcatcgccattgacagaagtcaaagatggttcaattgtctttgaaaatgcttgtttcagttacgcaaatgatcaaacgagattggcattggaaaatgtcaacttacgaattgaatccggagaggtaatcgggatcatcggcggaaccggaagtgcaaaatcaacgctggtccaattgatcccccgtttgtacgatgtcattgacggtcgtgttctcgttgggggacaagatgttcgcgcctatgatttggcagcattgagggatcaagtcagtatggttttgcaaaacaatgtcctttttagcgggacgatcagtgagaatcttcgctggggaaacgcggaagcaacggatgaagagattcagcgggtagcaaaaattgcccaagcggatccttttatccaagaatttcctgataaatatgacacattgatctctcaaggaggaaataatgtctccggtggacaaaagcagcggttaacgatcgcgcgagcgctgttaaaaagaccgaaaattctgattctggatgactctactagcgctgttgatacaaagacagaccgtagtattcgagcaggattgaaacaagaaatcccgggaacgacaacgatcatcatttcccaaaggatcaattcgatcgaagatgccgatcgaatcattgtgatggatgatgggaaaatcaacggaatcggaacccatgaagaattattaactagcaatgaaatttatcgtgaagtctacgactcgcagcagaaaggatttggtgaaggtgaagaatagacaagcagcaaatccccagagaaccttgaaacggctgctggcgaccatgtttggcgattacaaactgcagttgattatcgtattgttcatgatcttgttaagtgcttttgccaatgttcgcggctcactttttttgcaagtggtgatcgatgaccatatcactccgctgctgggacaaagcaatcctaacttcagcggactgctggcagctattattcagatggcaattatttatttaattgggatcattgctggtttgacttacaactttatgatggtcaaaatcagtgagggcactcagaaaaaaatccgcgatcagatgttcaaacatatgcaaaaattaccgattggttattttgatggccattctgatggtgatatgatgagtcatttcaccaacgatacggatacattacggcaaatgatttctcaaagtattcccaatttgatgatggctgccgtcacattttgctcggttttcattgcgatgttttccattagtatcccattgacttgctttgtactggtttcggtcattttgatgctgaatgtgattcggatcatctcccgcaaaagcggccgcttctttggcgcacaacaacgggatctaggcgcagtcaatggctatattgaagaaatgatgcatggacagaaagttgtcaagatctttaaccatgaacacgttgtcatgcaggaatttgatgctttgaatgaccagttgcaatccagtgctacaaaggccaatgtcaatgccaatacattgatgccgatcatgatgaacttgctgaatgttcaatacgtgctgatcgcaattatcggcgggctctttgccatcaatggtgtctcgggactaaccgtagggatgattgcttctttcttacagcttagccgttcgctgaatggaccgatcagccaaatttcacagcagatcaactttgtgatcatggctttggcaggtgcagaacgtatttttcatttgttggatgagaccccagagattgatacagggtatgtcacgctagtcaatgccaaatgggaatctggccatttagtggaaacaacaaatcgtacaggactctgggcttggaaacatcctcacgaagatggaactgttacgtacacagaattgactggagatgttcgttttgaagcagttgattttgggtatgtggatcatcaaatggttctgcatgacatcaatctttttgctgaaccgggacagaaagttgcttttgtgggagcaacgggagccggtaagacgaccatcactaacttgatcaatcgtttttacaatattcaagagggaaagatccgttatgatggcatcaatattcaaaagatccaactagaatctctgcggcgctcattagggatcgtcttgcaagatacacatttattcacaggaacgattcgagaaaatattcgttttggtaaactggatgccacggatgaggaagtagaagcggcagcaaaactggcgaatgcggatatgttcatcaatcatttacctgagaagtacgataccgtaatcacgggggatggcgaagggctgtcgcaaggacagcgacagctactagcaattgccagagcggcgatcgccgatccgcctgttatgattttagatgaagcgacttccagcattgatacgcgaacagagcggatcgtccagtctggaatggaccggctgatgcaaggtcggacagttttcgtgatcgctcaccgtctttcgacgattcagaattcagatgtgatcatggtgatggatcatggtcgaatcattgaacgaggtactcatgatacgttattagcagagaaggggacctattaccaactgtatacaggaaaaattgagttagactgattttttcccaggaaatgaagaccggatttaagggtcttcgttttttttcttgctgctgtgctatactaaagaaaaactatgaggagtaagtggatagataggaggaaataggatgcatttaacggtttcacagatccaattgaatgaggaaatgtatgaactgggtgtcactgatcagggggctgcttattttggtcgtttagcagaacatgcagagttggctctttttttcccatatgcagaaattcgtgaatgttctcagacaccagaaaggtatgcaaagccgctgaaagcctatttcgctggggagccagtagccttcgattttccttttgactttgtcggtacaccgttccaacaaactgtttggcaagcgttaactgaagtcccttatggaacgactgtcagctatagtgaattagcggcgagaatccaacgtcctagtgccgtccgagcggttgccaatgctgtcggacgcaatccgatgatgattattgtcccttgccatcgtgtcctgggaaaaaatggtcgattgactggttatcggggaggtttgccgatcaagcggaaattattacagctggaagggattcctttcaaggactgagcgcattttttctgcaaaaatttactaggtcttcttctcgaatttagtgcttcataaattgtttgtttaaaagtaaaaaatactaaaaaggcgtttctttttatgctacctttgatataatggagttgtttccgtttacaaaaaaggagtggagaagatgaagcgaatgaagttgcaaaatggttcagatatccgtggaatcgcgctttcgacagcagatcttacagcggatttaacagaagatgcagtgaaagaaattgcttcaggtctgcggacctggttgctgcagcgatatacggaacccttaaaagtggcagttggtcgtgatagtcgtttaagtggtgaaacgctgcagcaggcgtttatgaaccaattgcgaatagaagggattacggttattgattgtgggctggctacaacacccgcgctatttatgagtacccagtttgctgattttgattgtgatgccggtgtgatgctgacagccagtcatttgccctattactttaatggaatcaagatttttagtaaatctggtggtgcagaaaaagaagatatctcgtttatcttagcacatcctgaagctcatccggctgaccaactcggcgagtattaccaacgagacttacttactccctatgcagcagatatggtgacgaaaattcgtcatgggatgcagacagaagaagaacagccattggctggaatgaaaatcattgtggatgctggaaatggcgcaggtggtttttttgcagagcaagttttagtgccgttaggggcagatacgaatggttcacagtttctggagccagatggacacttccctaaccacattcctaatccggataataaagaagcgatggctagtattacggaagccgttttacgagaacaagcagacttgggaatcatctttgacaccgatgtcgatcgatccgctgtggtgaccaaaagtggacagccgctgaaccgcaacaacatgattgctgttttgagtaaaatcgtcttatccgaacatccggctgcgagtattgtcacgaattccccgacctccactcatctaaagacatttattgaatcgctaggtggtcatcaagtgcgttatatttccgggtatcgtaatgttatcaacaaagcgatcgcccttaacgaaaaaggcattaatgctcagttggcgattgaaactagtggacatgcagcattcaaggaaaactattttttagatgatggtgcatatgttattgcgaagatcttgatgttgctgccaacacttcgtgcgcaaaatatcagtttggaagacttgatcgcggcgctgaaacagccagttgaaacccaagaattgcgtttcaagatcaatgattcagattatcgcgcaaccggggagaaggttatcgcatcgctagcgcatcatctcccatcggggtggcagattgacaatgaaaatgaagaaggcatccgtatacaggtttctgcaccttatggacaagggtggtttttgttgcggttgagtttgcatgaaccattattggtcttgcagatcgaaaatgaccaacctggacatttgccggcgatcgtccgcgaaatcagtgaacgtttgctgccgtttgaagcgatcgatcagtctgcaatcaaacaatttttagaaaaataatgaatagagaatgaagggttaatgttggtatttattatgttagtgatcatggctgtcacttatggtgtgaatctttttctgatagcatacatgagaaaacgaccgcagatcgatgtggtagaacgattgtctatgttactgggcgtcaatatgagtgtcttgtttgtagatgggatcgttttatttgttggaaagttattattagaagcagcgatgattattgaatagacaaagaaactcttagagagtcagagaaaaggaacttttttatctggcggatttgagagtttttttagctttttttaaagctgggattatcattcgctttcgatttagatatttgttaaagtaaagaagtggaggggaatattcagatggcaaaaatcatggtagtagaagatgaagcagttattcgccagctgatcatcgaagaacttgaaaaatggcaattcgaaacatttggaacaactgattttcatcaggtttttgacgattttgaagagcaagaaccgcaattgattttgttggacatcaatttaccggtttttgacggctattattggtgccagaaaatcagagagacatcgaaagtaccgattatttttatatcaagccgtaatacgaatatggatatgatcatggcgatgaacatgggggcagatgatttcgtgacgaagccatttgagatcgatgtcttgattgcaaaaatcaatgcactgctgcgccgttcctataactatgtcgaaaacaacagcgaaacgctggttcacaatgggcttactttgaatatcgacaacagcagcatgcagatcaatgatgaagtaattgatttaagcaaaaatgagtatcgattattatatatattgatgaagaatcacgggaagatccttagtcgagaaaagctgttgcgagcgctctgggatgatgaacgttttgttgacgacaatacattgactgtcaatatcaatcgcttgcgtcggaagattgagcaagccggtatggataattacatcgaaaccaaagttggacaagggtatattgtgccatgaacaaaccgatgtcattcattgccttcttaaaagaccgctggttacttctgattggttgggtgatttttttcttgctgatgattctagtgatgtggctgacacctgatttccccatcgactggggaactgttggctatctttttttgatggaatcagtcgttctactgctttttttgggcgttttttatattactaaacgtcgtttctggcaaaagctcacattccatgagtcagacagtgtcttacaaaactatattcatggtgcgcgttcatcagaggaagaactggttcaaaactatatcaatcagctgattcgcgaacaccaagacttgatgcagcaagtgataagcaatcaagaagagcaaaaggaatacattgattcttgggtccatgagattaaagtacctttggcagcgacgcgcttactgttaaattcgattgaatttgatattccagatgaaaagtatattttactggaaaacgaagtgaatcggatcaatgagtatgtggaacaagtgctgtatgtggcacgtttggacagtttttccaaagattaccttgttcaagaagtgtcattgaaagcgacgattcagccggttattcgcagtcaagccaacgtgttcattcagaagaatattcactatgcgattaaagggggagaccagcaagtattaactgacggcaaatggctgagttttatttttcggcaaatcctcagtaatgcattgaagtatactccggaaaatgggcgaatcattgtccaaatccaaaaagatgggcaaggaacgcgtctttcggtagaagattctggaatcggtattccggcagaagatctaaggcgagtctttgataagggatttactggtgagaatggtcggaagactgatatgcactcgacagggttagggctctatttagccaagaatctggccaaagaattaggaattgagttaacgatttcatcggttgtaggagaagggacaaccgtcacgctttacttccctctgctaagctactatcaagaaaatcgctaatgattttttgagaaataccatttagttcttgtctctataccgttttcactgatacactgaaccttgtgtgtcaaattgaatgataaggatggataagatgagtatagtatttgctttaataccgatgtttgcctggggcagtatcggattggtcagtggaaaattaggtggggatgcgaatcaacagacattaggaatgacaattggtgcattccttttttcactgattgttttctttgtcactatgccgacgattgatggctggatcgtagtgattggtttgctgtcaggactttgctggtcagttggtcaaaatggtcaatttcatggaatgaaatatctgggcgtttcggtggggcttccgttatctactggtatgcaattgatcttaaatacaattgctggagcccttttttttggcgaatggacgcaatcacgagactatttgttgggaatcaccgcattgattttattagtaactggtgcctatttgaccgcacgacaagacggggaacaaatgcctgagacagaaaacaagatgttggattttcctagaggctttcgttcgttgatttcctcaacaattggctatggtgcttacacaatcattattacttgggcgggaattgacccattggcaattatcttgcctcagagtataggcatgctgattggcgctagtttctttgctctaagaaaaaccaaagtcaatcgggcggtctggaagaatacattatcaggattgttgtggggaataggaaatgtttgtatgttgataacagttcaacagatcggactggccgtgggtttctcgctgtcacagatggggattattatctctacactgggaggcatattcttattaggggagaaaaaaaccaaaaaagagttcaaatatgtggtttttggttgcttgcttgttatttttggtggtatccttctagggtatatgaaagctgcataagtagtgaaatttaggaggatttatggatttatttcgtaaaaaaactattgaagccagtcccgttagtcatttgaaaaaagatttgaaattgaaagacttgatcatgttgggtattggcgcaatcatcggcacagggatttttgttgtgaccggcgcggcttctgctgtatatgcagggccagcattgatcttgtcatttgtcttagcggcttttgtcgttatcttatcagggctctcatttgcggagtttgcttcccgtatccctgtattaggcggtgcctattcgtatgtgtatgttgtatttggcgaatttgttgcatggctcgctggctggtttctgctatgcgagtttatgttggcagtatcttcggtggcctctggctggtccggttatgtccaagggttcttgacaagtatcggtgtgcatctgccaaaagcgctgactgctggctataatcctggcgaaggaacgtacattgatctgattgcaggattagtgatcatttttgtgacgatttgggtaagtcaagaagccaaaaaagccttgcgattgaacaatgctatggtttgggtcaaattcgggatcattgcgctttttatcttttttggggtattttttgtgaagccaagcaactggcagccgttcatgcctttcggattttcgggcgtctttaatggggcggcacttgttttctttgcttttttgggctttgatgcggtcgcaatggctgcggaagaagttgaaaatccgcaaaaagatgtgccccggggaattatcggttcaattgcgatcgctaccttattgtatatcgtggtcacgctgattttgactggaatcgttccctttaaagaattgaatgtcaatgatccggtagcttttgccatgcgatatatcgatcacggcttagttggttcggtgatttcggtgggtgccattttaacgctgctgacagtgacgatttccatgatgtactcattagcacgtttgctttatgctatcagtaaggatggcttgttgccaaaatcattgcaaaaaattaatcctaagcataagacaccgaaaaaagcgacttatgcagctggagtcgtcgccttcttttttgccgcagcttttccattgaatattttggcagaattaacgaatatcgtggcattggcctacttgatcttaatgtcgttggggatcatcaagctgcgtaaaatgatgggcatgcccaaaaaaggggaattcaaggtgccgcttgtgccagtcttgccattagtttctgttgctagctgtttgttcttgatgacgcgattgcagacagccacttggatcgtttttggtattacgatcgtcattggtttgctgatctattttatctatgggtaccgcaatagtgcattgaatgaagaaaaccagcaagagcgttagtgtttgctaacgctcttgtttttgttcatgtcttggcaggaaaccaaaagtgatgacactgtaaaaaacgagcccctgagagattcccagaggctcgttcagctaatagaaaacagtattgcgtctgcctgaattatttgtttccagtcaagtccaacaagcgatctttgaggtcttcttccaagtgacccaattccacttcggccgctcggcgtttttcttttccttctttttggatacgcaatgtttcctgaattgtttcgacaagatcgttttgcgttttttgcagcgtttcgatatcaacgattcctcgttcgttttctttagctgtttcgatcgcagagaccttcagcatttcagagttcttacgtaagagatcattcgttgtttccgaaacttggcgttgtgcagtaaccgcatctttttgacgcaataaagtcagtgcgataacgacttggtttttccataaaggaatcgctgtattgacagatgcctgaatcttttctgctaatgcttggttggtattttgaatcaaacggatctgtggtgcttgttggatcgtgatctgacgggccaagcgcaagtcatgggtccgcttatctaagcgatccaaaaattgcgtatagtcattggcgatctgtacatccatctgatcattcgtttcttgtgcttttttcattgcttcaggaataatcgttgtttgtagttcttgcatttttaactcaccggcagcaatatagatattcaatgcatcgaagtaatctttgtttttttggtaaagctgttccaacatcaaattgtcttttaacagaccgtctttttctttgtctaatttaacagcgattttatcgatttgagcaccgattttttggtatttagcggtgatctcaaaaatcgattgtttgactttgccaaacatccgtttgaagagattgccttctcctgcacgtaattcatctggattagcttcttgcagacgatacatcaactctgtcaatgaatcaccgacaggtccgatatctgctgcttgcacatgattcagcatcgattgagagaattctcccagcttggtttgagcagctgcgccataggtaatgactgcttgttggtcggttggatcaatcttattcgctaactcttgtgcctgtgcttgtcgctcaggtggtaatttatcaattaagcgagaggctttttgttgttcttgcaaggcattgatctctgcctgctgggttgtcgtcaatgtatcgacaggggttgcaaatggattattcaatagatcatcaagagtatcgtttactggtttaacttgatttggtgtctccgtcattctaactcctcctaagtcttgtttcgaaaaaaatctagcctgggctagatttttttttggatcgcttcattcgaagatcgagcaaaggaatccatccctattcattatctcgttttatgctttgtttggcaatggataactcgatatcaagatcatctaaatcatctgccacaaactgctgataatctttagcgatcaacgaggccatttgttcaatgatttgagtgctttcttcgattttttcataggtttcacggcttttgatctcatgttcattgatctcaatgaatttgtctgtcaaatcaaccatgttcggcaaatgggtgtaaagaaaatgactcgccgaatgtaatttcgtcggttctttgaccaactctttgaacagtgctttcgaagcgcgtaatgcatcatgacgcaagtcgatcgcttttaatttattgctgcggttgatgtttttttgtaaatgctcgatctgttgtttggtttgattcatggtttctcggaacagttcgatttcactcggagacataccgcttttcaagtaatgcgcttctttttctttcgtcagtataggtaacacattgggatttgcttctaccttacgccccttcagaccaataaataccagaatcgcgccaacgatcagcaacaagacagtaaacaaatcagtgcctgtggaactgataaaggcaaaaagtgtgattacagcgatcgcagaaacgatcagccaaatattttttttcatttttcctcctcctaaaattctttggacaagtaatatagggattgttcgacatccttattttagcatgttcactagtagaaaaatatcagacttggggtggattttccgatatttagtaaaatcataatctttcttgctctttcttaaggagatatttttgagaaactatgctaaagtattttgtagaaaagacgttaaaggtcaggtgaaaaaatgttaacctataaagattttgaagaaaaaacgattgtcagaaacgagatttttcatggaaaaatcattgatgtcgttgttgatgatgtcgcattaccaaatggcggtactagcaaacgagagttggtctttcatccaggcggtgttgcagtgatcgctgtgacagaagaaaataaaatgatttttgtccgccagtttcgcaagccattagagaaagtcattttagagattccggcaggcaagatcgatccaggagaaggtgcacagcccgaattgactggtgctcgtgaattagaagaggaaaccggctaccgagcatcaacgttggaacatgtgcattcgatgtatctttccccgggctttgctaatgaagtgctgcatttgtttcacgcgaaacaattacaaaaagtagagaacccgctgcctcaagatgaggatgaagtattggaagtgtatgaattgacaatgaaagaagccaaagcagcaatcgcagatggaacgatctgtgatgcaaaaacgatttttgcgattcagttttgggagcttttagaattgaaacggaggaacagtcgtgcctaaagaaccactgatcacccgctctgaattgcgtcgacgtcgtgaagaagaaatggctgcttctgagcgaaaccaaaagatcgttgctaagcaagcaaacaaagagtggaagcaaaaagaaaagcaaatcgacaatcattatcggaaagtccgtaaaaaaaataaagcgatcactaaaacgagagcaggagaaaatcagaagtcccgcaacttgaatacttttttgatcaaagcaatcgtggtagtggcattgctgctgatcgtagttgcattagcgatctttttgctttaaggaacacgattaatcgggtttaattcgttgatcagcacatgtatctaatcaaaaaccagcacgcagagcatcagcgctcagcatgctggtttttttgttttatggctgggatggcttagcagcgctatatagaaaaagagcagcatcttgccccataaacaactgtggaccttcaaaaaatgtttcataacttactgaatcaaaacctactgattctgctagttggagcagcgtgtcttgctcaaatccattgtgtactttaggatgtgagacggattggtttttattgaaatcaacgatgaacaaacgtccgccgggttttaacaattgataaagttgctgcagtaaatgttctgtgtcgggaatatgaagcattaccagcgacaacagaacgatatctgcttcttcatgaatggactccttcgttaaatcgtggagtgatccagaaacatttgtcagcccttgctgggtgaccttctgatcaacgatcgccagcatgccctccgcagtatcccaaatctgcagttgcttgactaaaggggccagcggtaaactaacaagacctgttccgccgccataatcaataagaatttgttcacgggcattcatcagttggggtcttactgctgctgtaatcttttcagctagagcaatccttgggggtgtatcgtaatggtcggccattttattaaatatctcagacataaaaacctccttaatggtctgacaaaaaactgttcctttgagtaaaactagtttatcataaaaggagaaaaaatgatcttttattaagatataatgtataggatcgtcaggaggctacaagatgaaaattggtattatcggtgcaatggatgaagaaatcaagatcttgcgggaagcattggaagctcccttatcttgggagcgagctggagcactatttatttccggcagtatcggcaatcatgaagtgatcgttgttcgatctggaatcgggaaagttgccgcttcactgacaacaagtttgctgattcagcaatatggggtcaacatggtgatcaatactggatctgctgggggaatcggtgctggtttagccgtcggcgaccttgtgatttcagaaaaactagcttatttcgatgtagatgttactggatttgggtatacatatgggcaactcccagggggaatgcctttgtatttcgaggccagtcgttacttgatcggcgaaatgaccaaagccgcagaagcaacgaatcacaatgtaaaaaatggcttgatcgtaacaggggacagctttatcaatgacggacgtaaagtacaagaaatcctaaggcacttcccagacgctttggcttgcgagatggaaggtgctgcgatcgcccaaacagcgaagcaattcaatattcctttccttgtcgtaagagccatcagtgacactgcggatcatgctgcaacagtttcctttgacgaattcattttggaagccggcaagcgctctgcagaaatggtgctcgcctttgttaaaaagctgaaataaaattggaggagatcacaaatgaacgcattactctcaattgattatacggtcgattttgtagctgatactggtcgtttgacgaccggtcaagcgggtcaagcgattgaaacaacattagtagatcatacccaacgatttatcgatcaaggggattttgttgtctttgccattgatcgccatgaagcagaagatccttatcatccagaaaatcagttgtttcctcctcataatctggcagggtcagagggacggaatctctacgggacactagctgcagtgtatgaagatcacaaagaaaaagaaaatgtttactggatcgataagcgccactactcggcgtttagtgggacagatcttgacattcgtttacgggaacggggcattactgcactttatttgactggtgtctgtacagatatctgtatcttgcatacggctgtcgatgcgtataaccttgggtatcgattatttattttcaaagatgctgtcgcaagtttcgatccagtcggtcatgaatgggcgttgcgccactttgagcagacattaggggctactattctttaaaaaaaggagctgagtgtaatgggatttatggatcaattaaaagaacagtttagtttcagtgaattgacaggattgtatcagtcctataaaagcggtgaattggatgttgacaagattttgaatgatacgttcatgcaaaagtataccgattttgaaaatgtggaagcattgatgacaaaactaggcattcaagataaagatcaactcatggactttatgaaagatagaagcaaccggtatcatgctgaccaagtcgtaaaggaccattcccaatttgattctctaatcgaaatgatcaaaaaagcactaggaaaataaaatcaccgcccccgaaaagttagcagcaaacagctaacttttcgggggcggtcttaatattgtatcttttgatgaaggtgacggctgattgtatttctgaactactttggctaatgatgtgaggtgaatcctctttttttttttttaaagttgcatcaacaaatggaccaatgattcataaccaaacagttcgtaacaaatgcctcgtagcaagctgtatcttaccagatttgaacacggtcttcaggagcccggtacatgccatctcccggttcaataccgaaagtagtgaagaaggaatcgatgttttgaacttggatgttggcccgtaacttggcagggccatgaacatcaatggccagcagcaactgttgatattgttctttggcttttgtgcgccaaatttttgcccaattgataaagaagtcttctagtgagacgtcagtttctttttctgctgcttctagtgcacagcttaatccaccagcatcggcaatattttccgatactgtcaaggtgccattgaccgttccaccagcaaatggcaagccgtcgaattcattgatcatttcttgagccaatgtctcaaaatgggccaggtcctctgctgtccaccaattattcaggttgccgaattcgtcaaatttggctccgttattatcaaacgcatgggaaatctcatgagcgatcactgcaccgatcccaccataattggcacttgctgattgagaaagactgtaaaatggtgcttgtaaaatagctgctgggaagacgatcacattcttgaaaggatgatagtaggcattgactgttgctgcagacatttcccactcctcgcgatcgaccggtttttgccatttgctaaaaagatcttcccggaagatacgtccaaaacgtagtgcattttgtaacaatgatgcatcagggtctgtgtgcagtcgatcatagatggctgggattttgtctggataaccgacatggattcctagtttatttaatttaacgattgctttttgtttggtatgctcgctgagccaagtattgctggtcaaacgatcttgatagacgccgatcatcgttttcaccatatgttttacatcattttttgctttttcaccaaaatacttgcgaccataataatcaccgacgacttgactaaattggccaatcgtcagataataggcggctttttctttaggcatcgcttcatcaacgccagagaggtaccgattgtaggctccgccgagttggcgtagttcttcactaagatatccagtgtagcgcaaactttgatgaacgatcatccagcttttcaataaatcaaagtgggtaggagagacaatgatatcgaatgcctcaaagtactcaggctcagtcacgaccagctcttttggttcggcatttaataaagcggttaatgtctttttgaagtcgagttgcgccgaatgctgtgcaaaggtatctagactttgcggattgtaatttttgctgtaatcggcattttcttctgcactgcgaacatgaggagcaatcaatttatcaaaagccagtgtttgttctaccagcgactctgcttcggattgtgatttccctaatttcgttaagagcgcaacagcattgtcgaagaaaacttgtagtaactcttctgcctgcgggtggtcagtataatatgttttgtcaggcaagatcgttgctggcggataggccaacagtgtattcattttcgcgtttttcatatcggagtcgatatcgaaagcaaatggtagttggatgccgttaagaatgaattcaggtagctgtgcatttaactcgtcataagacgcaagggtttcgatttttgccaaaatcggcaaaacttcttgacctgcgttttcatcacgggtagcaaaatcgcttgctaagcgatagaaagcaacggcgtctttcatttttcctttaggaattgctaaaggatctgccgccatattcttgaactcagccatcatcaactgatcgattccgtctaccagatcttgaaaacctccagttgccggtttatccgcagggatcaccgctgattccaaccaatcgccattcacataatcataaaaatcatcttttaataatgttgtcatatgcttcgctcctttttatgctttctcctattatggaacaaaattttccagtacgcaaaaaaagtttgtttttttcttaacgaaaaagttccttagtgtctaaaccggctaattcccgtggtactattaagatatactttggtaaggaggaatggcgatggaagaaagagagaacatagatacttggcagggaataccagaagaacgattccgccgctacaaatcttgggtaacaccttccggctatttgtgcggaacttatgctgccaccgtgtttttggcttattatcaagattatatcgatgagcagatcatccctaaaacagtgagaaggaaaaatcagctgcagccgggcgcactgactgacatcttgcggctcttgattcaacctcatggattgccaacgattgcttggcaggtggctcatggactatcacgctttttcactcattttgatctaccttatcgggggcgtgccacagttttcggcggctggcagcgagcctgcaaacggatcgatcaaggcaaaccggtgatcgttggtctcttgaagcctttaggaagtacctacggcaatcactgggtagtcgcatatgcttatttagaaacagagaccggacgttatctaaaagttcatgacaactgggggaattacaatcaagtgattccagccagctggattaacggaactgtctcgttaccttaaattaatttaatgaaaaaagcacctataatgtgctagaataaaagaaacaattcacttcacttggaggcagacatgggcgaaagttataaagatagttcattgaagattttcagtttgaacggtaacagaccgttagccgagaaaattgcaaaagttttcggtacagagttaggtaagtcaaaagtaacacaatttagtgatggagagatcgcgatcaatattgaggaaagtgttcgtggcgatcatatttttatcattcaatcaaccaatgaaccagtcaatgatcactatcttgaattgttgatcatgatcgatgccatgaaacgtgcaagtgccaaaacgattaatgtggttttaccgtactatgcgtatgcaagacaagaccggacggcaaatcctcatgaaccgatcacggcaaaattgattgccaatatgttagtggaagctggggcgacacggatcttgacattggatctgcatgccgtgcaggtgcaaggcttctttgatattcctgttgataatctatttacgattccgcttttcgcgcattattatcgcgagaaaaaaatgatcggagacgaatatgtcgttgtctctcccaaaaatagcggagttcagcggacccgcagtttagccgaatatttagatacagcgattgcgatcgttgatcaagatgaggcagatggtggctatgtgattggagatgttgccggcaaaaaatgtattttagtagatgatattttgaatacaggcaaaacattgtcaaaggcagcagatttgctaaaagaagcaggagctagtgagatttatgcgtgcgtctctcatgcgttattgtcaccaccagccaaagacattcttgatcaatctgtcatcgaaaacatttgtgtcacagattcttgttggactgccgaagaacggcatccagaacggttgtcttacctttcttgtgcagaactgatgggcgaggctgtcaaacgaatccacgaaaatacaccgatgagtcccctgtttcggttagaaagcaaagaatacaaataagaagcaagagagttcggttattctggactttcttgcttcttatttgtcatgagacagtgcaatttatgctaagttattgaggttcaagacagtctctcgtttaatcagcttatgcgggacgacaagctgaaccgcatttgaaccttcatggtttaattgtgccatcaagctttctgtggcgatttttcctaaggataagacgttgatgtcaatgctggtcaagtaaggatgggtcaatgtagcaaaaatcgagttattaaagctgatcacagatagatcatccggaactttatacccgaacatcgttgccagttggatgatccgaactgcaaaaagatcatcgattactacgattgccgttgcttcggtctctttgatcgttgtctcgaaattgacatagtcttctgcctgttcaaatgtcaatgccggataaaaaggcaggttggctagcatcattgctttttgatagccaaagaaacgttcgaaatagagattttcgtgagttgtattcgtagcaaacaatatcttagagtgtccttgggagatcagatactctgtcgcttgttttcccagcatttggttgtcattatcaacaaaaacgatattttgttcattgctgtaaggatgtccaatcaatgtgaaaggaacttttttacgaactaaataatcaatgattggatctttttcatcggaatagactaagataaaaccatccacttgtttttgaaggtgcatacgttccacatttttcaataatgtatcaaaatcacgggcagaggcaaccgcaaccgtcatttggtggtggcgagcttcttcgttgatggcttcgatcgtttctaaatagaaaggatttcctagccgttcctttgaatccaaaggcggcaagataacaccgatcgcgcttgaaatctgcttgcctagatttcgcgcagccaaatttggcacgtagcccatctcagccatgattttgcgtactttcttttttgtgtcttcagagatactagggtgatcattcacgacccgagaaacagttgaagtagcgacgccggcttttttggcgacatctttgacagttacgctcactgttttccctccttttttagcttatagtatcataaagttgtgttattttggtagccggaaagaaaagaaagaagaaatgccttcatttcttctttcttggtttctgatcaataattaagcaatagttactgagacttcttcttccaacagatgctcttttccataaagctgaaccgtcaatggctcaccactgattttctttagtgtgacagtttcttctttaacagaaatgaataataagcgtccgcgataattgatatggaaagcatagctgttccaagtcttcggtagaaacggggcaaaacctagatgggcatggtccgtcttcatttgggcaaatccttgaacgatcgctaaccaactgccagtcattgaagtgatatgcaaaccatcgtcggtatcattgttgtagttatccaaatctagccgagccgttcgttcatacatttccagtgctttttcttccattcccagctcggctgctaagatggcatggatactaggagacagggaagactcgtgcactgtcattggttcatagaagtcaaagttgtttcgtttttcctcttctgtaaattgatccccaaagaaatagattccttgtaagacatccgcttgtttgataaagcaagagcgcaagattcggtcccatgaccaattttgattcaatggcaagttttctggatctaaatcagtgactggcatcaaatctttgtctaagaaggtatcgtgctgaacgaaaattcctaagtcttgatcttctgggaaatacatattgtcaatgatatcctgccagtagtcttgctctttttctgggatcgttacggttgcttctgtggcatattctttataactttgtaaagtatagctcaagacccaggtagccatcttgttcgtataccagttattgttgatgttattctcatattcgttggggccggtaacgccatggatcatatatttttgctgacgtttggaataatggacacgatctgcccagaaacgagcgatggccgttaatacttccaagccttcttttttcagatagctcgtatcacctgtgtaattcgtgtagttatagatggcataagcgattgcaccatttcgatggatctcttcaaaggtgatttcccattcattgtggcattcgatccctgtaaatgtcaccataggataaagcgcgccagccaagccttgtttttgcgcattgatatgggcttgcggcaattgattgtggcgatatttcaacaaattccgagtgatttctggtttcgctaatgccaaataaagaggcacagcataggcttctgtatcccaataagtagcgccaccgtatttttcaccggtaaatcctttaggtccaatatttaaacgttcatcttctccataataagtcgagaagagttggaataaattgaaacgaattccttgttgcgcagcagcatcgccttcaatgatcacatcagctagtgcccagcggtctttccaagcattgacttgttcttgccgtaagtcttcgtaaggtgcgctgtacacttggaaaagctctgcaatttttgttacttgatcatgaggattgacatcacgactggtaacgataatcacgtctttttgtaaatgaaagacagctcctgtttctcctgtaaaagtaaacgcgtcagcaatcgtcaattcactcgtctctgtggatgctggctcttgactatgacgcattgcggcagtgaccgtgaattgctcaatgtcaaagttgttttcaatggtacgggtggtcagataacgatagttgcctgagctgccgtggtctaattcttcccagaagcgttcttcgtaattactatcttcattgcggacattattgtctagtttagaaatgactgtgatttctgctgatccttcaaggatttctgcctgcatcgtgattaccgccatttctcgcttgacgatacttaaaaagcgctcaaaagtaaatttgacagttgcgccagctaatgaaactgtaaatgtccggcgtaaaattcctgtttgcatatccagttccatataaaaatcgctcggactgattttcgcaagatcaacagcctgattgttgatgaaaagatccattgcaatgaagttaacagcattgatcacttttccaaaataatccggatagccatttttccaccagccaacacgagttttgtctggataccagacccctgccagataagtccctagatggtgatcgccactatattgttcttcaaaattaccccgcatccccatgtagccatttccaatacttgtaagcgactcttgtagtcggcgattttctttatctaaagtagttgttgcgattttccaaggatcgatatcgaacaaacgctggatttttttcataggtttttcctccaaaatctttttgataactctataataaatgcaaacgattgcgttagtcaagcgtaaatcattggtttctatgcttttttaaatagaagtgtgacaaagagctgtttttgcgcatttttgtaaattaatggctgaggagaatgtaaattgaaatttctcggtttacaaaattttcaatctccgctacaatgtgattattaagaaaccgattgcgtaaaacggtggaggaggaagaaagaggatgaaaaaattactaagctttgaattctggcagaaattcggaaaagcactaatggttgtggtagctgttatgcctgccgccggattgatgatcagtattgggaagacgatccccatgattaatgccgattgggcatttttggtaacgaccggtggtgtgatcgaaaatattggttgggcaattattgggaatctgcacttattatttgcattagctatcggtggtagttgggcgaaagaacgcgcaggcggggcattcgctgcggggattgcatttgtattgatcaatcgaatcacaggttcgatcttcggggtcacaagcgccatgctgacggaagaaggggcttttactcatacattgttcggtacgaaaattatggtggatggcttttttacaagtgtcttagaagctccggcactgaacatgggtgtttttgtagggatcatcgccggctttgtgggtgcgactgcttataataaatactataatttccgcaaactgcccgatgcgctttcgttttttaatggcaagcgcttcgtcccgtttgttgtaattgctcgttccgtggttgttgcgatcgtgttagcgatcgtttggccttatattcaagcaggaatcaataactttggcttgtggatcgcacaatcgcaagaaagtgcgccgattttagcacctttcttgtttggaacattagaacgattactattgccatttgggctgcatcacatgctgactattcccatcaattatactgaattgggaggcacctatacgatcttatctggtgcacaagcggggacacaagttttcggtcaagatcctctatggttagcttgggcaactgatttagtcaatatgcgaaatgcaggggatacttcacaataccaattcttgatagagaattttgtgcctgcacgtttcaaagtcggacaaatgatcggttcttctggtattttgatgggacttgcctatgcaatgtatcgcaatgtcgatgcagacaaacgccataaatatacctcgatgtatttatccgctgccattgcggttttcttgacaggtgtgacagagccattggaatttatgttcatgtttgcggctgtaccgttatatgttgtttatgcagtcgttcaaggggcagcatttgctatggcggatatcgttcacctgcgtgttcactcctttggaaatatcgaactattgactcggacaccaatggcgatcaatgcaggtctgggtcaggacttgatcaattttgtcctagtaacgatcgcatttggggtcggcatgtatttcttggctaacttcttaatcaaaaaattcaactttgcgacgcccggacgcaacggcaactacgaagtagaaggagctgacgaaaacgtagcaacaactgcctctgacggaacgttagatccaaactctcaagtggttaagatcattcatctgttgggaggacgtgaaaacatccgcgatgtagatgcatgtatgactcgcttaagggtctctgtcaaagaccctagctcagtaggagacgaaaagtcttggaaaggtgctggcgcattaggtttgatcgtaaaagataacggagtgcaagcggtatatgggcctaaagccgatgtacttaaatcagacatccaggatatcttggattccggtgtggcgattcctgaagcagtcataaaagaagtcactaatgagacgaatcacgaaagccaagggataaccgctgaggttgtttcagtagccgatgggcaagtgattccgatcacggaggtcagtgatcaagtctttgcagagaaaatgatgggggacggatttggcgtgattcccgataacacgcaggtgtattcacctgtctctgggaaagtgacgaatgtttttcctacgaaacatgcgattgggttgctatctgatgaaggagtcgaagtattggttcatatgggcttggatactgttgaacttcaaggggcaccattcacagtttctgtcacagaagggcagcaagtcacaaaaggtgacccgttggctttaatggatctcgcagctatcaaagaagcgggtaaggatacaacgatcgttgtagtaatgacaaataccgatcaaatcgattcctttgaattgtcccaaactggtcagcaaaaagctgcagcagttgttggaatcgtcaaactataataaaatgactaagagctgtgccataagtattttaccaaactgaatatccaaacgatcgtggggttgctacagtctggtagtttctcgtcgcaattcacgagaagtacagctgatctcatacagtgcggatagtttcgtctggttcatacttatggcacagctccgttcttttatttacattttgaaagaagataatcaaacgcagaggagcgttattcatgaaagttttaacattaaacacccatagctggttagaagacgatcaagaagcaaaattaaaagtgatcgcacaagaaatcgcagcaggagattatgatttgattgcgttgcaagaagtcaatcaatcgattgctgctacaacgatcgttccggatggtctttattgtccgacagaggcgatccttgagatcaaagaagacaattttgctttgcgcttagtagaagaactgcagattctggatcacgattattattggtcatggacttacagtcatgtgggttatgatgtctatcatgaagggaatgccttactgtccaaaaatccaatcattgccaaagaatatttggcttctgagacaaccgatgtctgggaccatactacgcgaaaaaatcttagcggtctcacagaagtagacggcaaaatgatccaagtgttaagctgccatttttcttggtggaatgacggcaagtttgcctatgaatggcagcaaaccgaagcgtttttgactgagcgagcagcatcgctcttgcttttaggtgatttcaataatgaggcagacagcttgggttatcagctggttaaaaacagttcattgcagctgcaggatagttttcttgccgcaacaaaaacgatcggtgaggcttcggttgttaaagcaatcgatggctggcaagacaatcagacagccttgcgtatcgattatgtctttgcctcacagaatgaacagcccgtagagtatgaagtggtctttgacggtcagcggctgccgatagtcagcgatcattttggtatctgtgtggtttttgaataaccaagaatagagacgacttcgattattcgcttgctatcgcttgaatcggctagagattcaggaagcagacaatcgattaaaaaaaggatgagaccagaaacgaatttctgatttcatcctttttattttgatcaaatgtcaatcgaaccatagcggttttttaaggcagtgcgtattaagcgttctgccaaatgttcattccgggcaagcagtggaccatggaaataggaaccaaaaacattgcggtagaccacgccttctgtttggtcctcgccattgtttccctgcccttctacgactttacctagtggtttctcacctttgccaagaaacgtccgaccattgtgattttcaaaaccataataggtctcatcgaattcttcattatggataacgatatctccgatgaagcgattgttttcttgactcaatgtgtaatgatccaatgcgctaattcctttgattttctctccgttagctcccatgtagtaatgacctaacaactgatacccgccacaaatggccaacatgactccatcgttctcgatgtattccgtcaatgcttctttttttgtttggatatcttcagaaacgatcagctgttcaaaatcctgtccgccgccaaaaaagactaagtcatacttcttcggatcaaatggttcatggatgctgacgacttccgaaatgaattctacacccattttttcggctacataacgcaacatcaacaaattgccattatccccgtaggtgttcagcaaattcccgtaaagatgagcaacattcaaacgataattagccacgatccatcccccctttgatatagcctttttctgccaattttttgcgtagttgcaaaacagcagtataggttgctaggatatagactttttcagttggtagattggcgatatctttaatgacctcatcaaggtcttttgtttcggtgatcttttcttcgggaattcccgctacttttaaacgcagcgtcatatcttgatggcggtcgccgccagcaatgacttgaggaatcgccatttcggcaaatgcttcatgatttccatcccagatccagctaacatcaatgccgtccgcataatttgcattcaagagactgacgagagaaaaaggatacggagataagccgatcatatcgatcacttgattcagtcctaccggatttttgactaacacgagtgtacactctttgccatcgatggtaatgacttcttgacggccaaagactttttcatcataggccaatccagctctgattttttcaggtgcgacttgataatattccgctacagcggtcgctgccaatgcattatagacattgtacatgccgccaacttcgattccatatgaattcccatcaatgataaaatcagcagaagtattgtccattgctgtgatggctgtcaatttgtagtctagttttggacgtttgaagccgcagttcggacaatagtatttgcctagattcgcataggtaatcatttggtaatgtaagatgtggtggcattctggacaaagaaccccgtctgtattgtaatgggccatctgctcctgattaggtaagtgatcaaagccataatactttcttggattaacagtagtgacagaattgaacaacggggaatcaccattacatagaattgtggccgtcggtgaatttgctgctccttcaacgatcattttatatgttgtatagatttcaccataacggtccatctgatcgcgaaaaatattcgtgaagacaaatagttcaggtttgatatacttcgttactttgctaagactagcttcatcgatctctagtactgcaaactttttgccgccttttggtttggcagataagaaagtagaaacgattccttggaccatattggcacctgttggatttgtcagcacatcatcaaattcttgccgtaaaatattcaccgtcagtgcagtagtcaaggtttttccgttcgtaccagtgataacgacaacttgataatcttttgctagatgatctaaaatatgcggatcgatttttaatgctattttcccaggcagacttgatccgcctttaaaaaagttttttaatacccactgagaggtcttaccgactgtgacagccagttgacttcttaaccccatagttgaacctccaaacgagatgattgtctttttagtttaaattcaatttatcataccatatgttctaaaaaaggttaaacggcttttcgatttctttaagtttctgcaaagagttcagtttattgaaccaaaaaaggcagagacattcgttacaaacaagatgtctctgccgcttcaaaacgcttgtggaaggctcgcgactttaagatacaacgcttagaaccttcaatagcgccattttactggctgtttaaccaataataatcttctcggttgggtattcataacctaaatctcgggtttcttttggcacaaacaacaacaacgtataaagcatacctacacgtccaatgaacatcagtaaggctatcactaacttacccacacttgagagatcatcggtgatccctaacgataaaccggtggtcccaaacgcagaagctacttcgacaatgatggcgatcaacgggatatcttcagtggcagtcaaaaataatacgcagaaaaagcacattcctaaggataacatgaagacaacaaccgacttacgcacatcgtcttcatcgatccgtcggccaaatatgttgatattgtcttcactctttaagaaggcataaagataaagaccaataatggcgatcgttgtcgtacgaatcccgccaccaactgaacttgggctgcaaccgataaacattagtaacgaaaaaacgatcaatgtcgtagtctgaaagttccctaaatcatggatctgcagtccagcattacgggtagtcatggaataaaacatactgttgatccaggtgctgctaaagccgtaatctttgaacagatggtctttctctaggaaataaatggcgatcgttccaccgataaacaaaatcacaaaagccaacatcgcgatttttgtaaacaatgaaaagcgaaaaggcagttgtcggcgattttttttcagcttgaagagggcccattctcggaaatccataatcactggaaacccaatcccaccggtaaaaatcaaaaacatgatacaaatcaaaaagaaataatcatgtgcgaaaggtaaaatggaatttcctgtcacgtcaaaaccagagtttgtgaccgcggaaatagcttggtaaaaaccataaaatagggcatcccgccaattgtcataatagccattaaaataaaaataaatagaaaaaatagcgccagagatggcttggcaaagtaagatgatcgtaaacgtgattcgaatcatccgcacgattccgcttagctttggctgattcatatccgtcataatcaactgacgctgcttcaatgagatctttctccgagaaacgatcgcaaagaaagtggagatcatcataatccctagtccacccacttgaaaaagaacttcaagaagcactacaccgcgatcattgaacacatcatcgatagggaatgtcgtcaatccggtgacactgaccgtgctgactgccataaaaaacatatcgatgaaggaagcatgagaacgaggttcacgaaaaaagggaagataaaataaacctaaggaaataatcgtcatcagaatatagtaaaaaacgatcacttggatcgaagaaacattttgggcaataaaatatttgcttttgcgttgtgtcagacgagcaaaccgcgtgaaattcataactagtctcctcactaaataaactacccacagtataccaaagaaccaagcagtttcaaaagaaagcaagattgaaagtaagtagcagccaatatcatcaaagaaacgctctgcaaaaatatgagatagtgccgcaaaacaattaatggaacagagaagacgatagcctgtcattgagagagtactagaagatagcggtgagccggacaaaaaactgtatgcccgataagtctgttgggcatacagtttttttgaagagatcggttagttagagtgcttccaccgcttcgattgcgcgaaagactttttctggagtgatcattgggtcgatcaggacaaatgtttcttcttctttaacggcataagtcaaaacaggcgcaaaataagcgcgatccacacgagtgacatgcaagtcttttagtttcataggtaagtgcaatgcttcgtagaaaggacgcagttcctcgataacagcaaaatcgttggtgtaggcaagctgtacccagatgcagtaggccactttattgccatggaggacactgtgggtttcgctcagataagataagccgtcatgtaatgcgtgggcgccagaagttctgccaaactctacagcaaatccaccaacttctcctgctaaagcgatgatggcatctgtgattcgcgcaaaagctggcgtcaagcgcccggcttctaaatcagtgactgcttggatggcatctgcgatcaagagttctttgattagttttgcactttgaaaaccgagccgaaccaaggctgttttatcttcttctgccatcgtgcgtacaatggcttccatttcataatacttggctagcgtgtctgcgatgcctgcaatgaaataatccacgggtgttgctagcaagaatcgagtatcgacgatcgtcatataagccccttttttggcgtaatcgatcttgcagattgtgtggtctgggtaataggcgacaatcacaggagtaaagggtgcacagttggaaaccaatgtagggatgacgatcagctccgcttccattctttctgcagtaatttttgcggtatctgcgacacgtccaccaccgatcgcaagcaggacatctgcgtgtttgatcttatccgctaactcctgagcattctcataacttgaggagccatcatagcgataaacaggatagtcaaatggatgcggataataggttttaaaaacgtcaaatgattgatcgccagtaatgacagcaacctgatcaaaatcattgagatactctggtagatcaaaaagaactccttcaccagtaatataccggtttggtccagggcggacttcattggctaacataacacaacactcctttgcaatcgtcagaattttctaattagtgtaacgtggaatagcgcctgctgtcaatttttcttttgagcagttttgttcagatcagccaggccaaagccaatcggcgcaagcaggcgtaaagagggcataaagaaagaccctaacaaaggagagtttgttcttgctagtcttcgcataatcaagactgttttgcgaagatcctctccttttgagggtcagttgttgggcgagaaaacagcactatttctatctcagaaactaaaggaatattcaaactgccgcttctcaaaataggttatgtccagttttgacggatgaaaccagctcgtcctgaaccttcacggtaggcgttgtaatgcgccgtatttttcttataaaaatcttgatgatagtcttctgctggatagaaaggttcagcaggttcgattgttgtcacgattggatctgtaaagcgaccgcttgcttgcaaagcggcttttgaagcttctgcgatttttcgttgttcttcactattgtaatagatgactggacggtaagagtccccacggtctgcgaactgaccaaaggcatctgtaggatcggtttgttgccaatagatagccacgagttcttcatacgttatttgttcaggatcgaaagtgatttctacggcttctgtatgtcctgtggttccagttgttacttcttgataggtaggatgagggacatgtccaccggtaaaacctgagactaccgaaagaattcctggtaaagaatcgaaaggtttgaccatacaccagaagcagccgccggcaaaaattgcagtatctttcattgtgattcctcctttggttttatggtatgcttcttatagagaaagacaagcgatatgcttataagaaacggccaaagaaagcgaggtttgctgtggatacgatcatcattttattgcgggggaattctggcagcggaaaaacgacagtagcaaaagcgctgcatcaacaattaggggcagaagcggtgttgatctcacaggatgtatttcgccgagaaatttttcacgtgaaagatacgcctaataatcatgctgtaggtctaatgatggaggcccttttatatgcgcgagggaaggttcctttcatcatcgttgagggaatttttgcccgtgaaaaataccaggacttcttgctctttttactagaatcctttgagaagtgtctcatttattattttgatgtgccttttcaaacaacgattgaaagacaccgaacacggccgcaacgggtatttttttccgaatcatcgctacaaaagtggtggctcgaaaaagaccttctctttggggaaaacggcatagcgtccaagagcaatgatacgagtaataaatcagtcctctcaaaagagaagatgtttacagagaagcagacaatatctgaaatgatcacgatgatcttggaggatacgaaacagtttcaaaaatagccttgaagcaaacgatctgttttccaaaaaaactaaagtgaggtatctctatgttagacaaatcaattccttatgcagaaatttggatggagcgcatggctgcggatgaagtagcaccggtccctgactcaaataactacatcattcaaccttatcaatccggtgatgcgagtgagtgggcgcggattgagacagcggtgggagaatttgatacagaagccgcggcacttgcgtattttgaaaaagactttctcccctatgaatctcaattgccgcaacgaatgttttttgcagtggatccagaaggaacaaaggtaggaacagcgactgcttggtggaagaagaagcaagatggcaacattgtgccgctcgttcattgggtagcagtcattcccagcgctcaaagacaagggatcgctcgcggcttggtaaccaaagttatagaaacatgccagaaccaaacggcagattccgaagaatctgctgccgctatttttctccatacgcaaacatggagtcatgctgcgattggactgtatcaacaactaggcttcaaacttattgatacagactatcagggacagatgaatcccgagtacgaacaagtattgactattttgagagacgtggcgcagaaggaaaacgggcagtaaagccaatcatttgcaggcatcgttctgttcagtacccctcttagcgacttctgaatttaaacctgtaaaaattccttgttttcaagtataataccaaaggagtatcaggaaggatgggcaagatggcacaacttttttttaaatatggcgcgatgaatagtggcaaaacgatcgagattttaaaagttgcacataattatgaagaacaagacaagccggtcgtgattatgaccagcggcatcgatacccgaagcgggatcggaacagtttccagtcgtattgggttagagcgtgacgccattccgattttcgatgagaccgatttgtatcatttagtaaaagatctaggatatcaaccctattgcattttgattgatgaggcacagtttttgaaaaaacaccatgtcttggcgtttactaaaatcgtagacgaattaggcattcctgtgatggcatttggtttaaaaaatgattttcgcaacgaattattcgaaggttctaaatatctgcttctttatgcagataaaattgaagaaatgaaaacgatctgctggttctgccacaaaaaggcgaccatgaatctgcattacattgacggtaaaccagtctatgaaggcgatcaagttcaaattggcggtaatgaagcctattaccctgtttgtcgcaaacactattttcaccctggaatcaaaaaagaaggagaataaaacatgtacgatcagttacaagcgattgaagaccgttatgaagaactaggcgaactgcttagtgatcccgctgtcatttcagatacgaaacggttcatgcagttgtccaaagaagaagcaaatacccgagagactgtcgaagtgtatcgccgttacaaagaagtcgttgaaggcatcaaagatacagaggaactattgggcgaaaacttggatgcagaaatggcagaaatggctaaagaagaactatctgacttaaaaaaagaaaaagatgttcttgaagaccgcatcaaaatcttattattaccaaaagatcccaatgatgacaaaaacattatcatggaaattcgcggggctgcgggtggagatgaagcggcactatttgctggagatctctttaatatgtatcagaaatatgcggaaacacaaggttggaaagtcgaagtgatggatgccaacgttaccggcatcggcggctacaaagaagtcatcatgatgatcagcggtgagaatgtctattcaaaattgaaatatgaaagtggcgcgcatcgggtacaacgcgtgccgtcgacagaatctcaaggacgaatccacacatctacagcaaccgtagtcgtgatgccagaagcagaagaagtagagatcgatattgctgataaagatatccgaacagatatctatcatgcttcaggcgctggtggtcagcacgtcaacaaaacggcatcagctgtccgcttgacacacttgccgactggtatcgtcgttgccatgcaggatgagcgttcacagttgaagaaccgtgagaaagcgatgaaagtcttgcgggcaagagtatacgaccaaatccagcaagaagcacgaagcgaatacgatgcaaatcgtaaatcagcagtgggaactggggatcgttctgaacggatccgtacgtataactttccgcaaaatcgggtgacggaccaccgcatcgggttgactatccaaaaattggatcaaattttggctggaaaacttgatgagatcattgatgcattgatcatgtacgatcaaacatcaaaattggaagaaatgcaaaatgggtaaaacctatcgagaagtcctttcacgggcttcttcttttttagaaacaaagggactggaagggtatgcgatccaatacctttttctggctcgtaaaaattggcaaaaactagattggttgctgcatatggatcagcaaatttcgccagctgataaagtgcaaattgaagcagatctgcagcagcttttagcgcatcgtcccccccaataccttttaggctatgaagagttttatggccatcgcttcaaagtaacagaagacacattgattcctcgaccggaaacggaagaattagtcgctttgtgtctggagcaaacagaacctgcagagaatttgcgggtcgtagatattgggacagggacaggtgcgatcgcggtctctttgaaattggcacgtcctcactggcagatcgctgctgttgatctttcagaggccgcattggcggtagctaaagagaatgcggcgcaattaggtgcggaggtcgctttttatcaaggcgacacgctgacaccagtgggggatcaatcatgggacatcattgtatcaaacccgccttatatcagtgagcaggagtgggagctgatggatgccagtgtgcgtcagtttgaaccccaaatggccctttttgcagcggagaatggtctagtgatgtatcgtaagattgcagaccaggcaaagaagttattgacacctgacggaaaaatcttcgtcgaaatcggttttcaacaaggcaaatctgtccagcgtatttttgcggaagcttttccagataaaaaagttacggtcattcaagatttatctggaaaagatcggttggtcgcagtacaataatccacagcatgtggacaaccatttttttgaaaaatttttttgataaaaaacagtgatagagtaagacttacttgcgaataaaagttataaacagggttatccacacttgacaaacgatttatccacaaaatgtggataaaaaccgaaaaaatgttgataagtgtggaagtcctcaaaaaaaggatgtggataaactgtggaaacaaaaaaatttagtgaagaacaattatccgaagcagcaaaaattttagccgcgggtggattagttgcttttcctacagaaacagtgtatggcttaggcgccaacgctcttttgcctgaagcggtagcacaagtctatgccgtcaaaggaagacctagtgacaacccattgatcgtccatctcgccgacccggaacaactgaaggattatgtggataacttgcatccagccgcggaaaaattgatggcaaaattttggcctggccccctaacattgattttttctatcaaaaataacagtttaccgtctattgtgaccggggggttatccacagcggcattccgtatgccagcgaataaaaaaacactttcagtcattaaacaggcacatgtcccactagtcggacctagcgcaaatacctctggcaagccaagtccgacctcagctgaacatgtattgcatgatttgaaaggaaagatagctggtgtgatcgatgatgggactactaggatcggagttgaatcaacagtcttggatttaagtgatccgacagcaaacccaatgatcttgcgtccaggagccgtgaccaaagaacaattagaaacggttttaggcagtgaagtcgaaatagataaacacctagtatctgaaggtgaaagacccaaagcaccgggaatgaaatacaaacattatgctccggatacaaaggttgtgatggttcggtcagaggactggccagcagcactcgattgggtcaagcagaagcgattacgagcaggtgtcttggcaggcccatcaatttgtgagacagccagatttgaaacagcagctgtttacatgtatgcggacgacacggttgaggcagcagcaaaaggactttttgcaggtttgcgagccttagatgaatcgatcgctggcttggagatcattttagcggccgcttttcctgagacagggatgggcagcgcctatatgaatcgcttgaaaaaagcagccaatcaaaatttttttcaggtaaaatagaaaaaacgctgctttgatcataggtagtgcttaggaaatatgatacaatgctagcattaaggtaaaggggtgttgtatgaatggactatcaaacgtttgatcctgatttatggcaagccattgaaaaggaagcggatcgccaacaaaacaatttagaattgatcgcatctgaaaatatcgtttccgcaggtgtaagagcggctcaaggcagtattttaacaaataaatatgccgaaggatatccaggtcgccgttactacggtggttgtgaatttgtcgatgttgttgaaaatttagcaattgatcgtgccaaagaactttttggtgcggcctatgcaaacgtacagcctcactcaggctcacaagccaatactgcagcatatctagcgttgattgaaccaggagatacggtgatgggcatggatctatccgcaggtgggcatttgacccatggctctccagtcaattttagtgggaaaacctatcactttgttagctatggggtagacccagcgactgaagtgattgattataatgtcgtacggatcttagcgagaaagcatcaaccaaaattgatcgttgctggtgcaagtgcgtattcacgaacaatcgattttgccaaattccgtgaaattgctgatgaagtcggtgctaagttgatggtagatatggcacatatcgcaggattagttgctgctggtctgcatccaaatccagttccttatgcagacatcactacttctacgacccacaaaacccttagagggcctcgtggcggcttgattttgaccaatgacgaagacttagcgaaaaaaatcaacagtgcagtctttcctggcattcaaggcggacctttggaacatgtggtcgctgccaaggcagtcgcattcaaagaagcattggatgaagacttcaaatcctattcagagcaagtgatcagaaatgcgcaagcaatggcaaaagtgttcaatcaagcaccgcaagcacggcttgtttctggtgcaacggacaatcatttattgctgattgatgtgcgaggatttgagcttaacggaaaagaagccgaagcattgcttgaccaagtcaacatcacagtcaataaaaattcgattccatttgaaacccttagcccatttaaaacgagcggtattcgtgtcggcacaccggcaatcactagccgtgggttcaaagaagaagatgctgtggaagtagcaaaactgattgtcaaagtgttggaacaccctgaagatacggctgttttggaagaagcaaaagcacaagtgaaagagttgacggacaagtatccgttgtattaagatgtagcaggaaaagggtttgagccgatgctcagatccttttttgaaggaatatggctatgacgtgatgcaaggttgtatcaatcgttgatttgctttaaaataaaagaaaaaccaaaggagacttttaaaatgggtaaattccaagtaattgaccaccccttgattcaacacaaattaacaatgatccgcgacaagaactgtggaacgaaagtgttccgtgaagttgtcgatgaaatcgccatgttgatggcgtatgaagtatcacgggatatgcccctcgaagatgtagtgatcgaaacaccgatcgaagaatcgacccaaaaaacacttagtggtaaaaaagtagcaatcgtaccgattctacgggccggactaggcatggtcgacggcattctagagttgatcccagcggctaaagtaggacacattggtatgtatcgtgatgaagaaacccttgaaccacatgagtatttcgttaaattgcctgaagacatcgacactcgtcagttatttattgttgatccaatgttagcaactggtggttcagcgatcatggccatcgatgcgttgaaaaaacgcggtgcttctaacatgaagtttgtttgcctagttgctgcgccagaaggtgtgaaagcattgcaggatgcccatcctgatgtggatatctacacagcaagcttagatgaccgcttgaatgaacatggctacatcgttcctggattaggcgatgctggtgaccgtttgtttggaacaaaataaaagaaagagcgtggaacaaaaagtgaaaaacacttttgttccacgctctaaacacgtctaaacgctgggagtaggagcaactccttcggaaataaatcgaactactcaaaaactactcaaacatttgaaaagcaatttccgtgtattcctccttatttcttggagattaccacttttgtcccagtctccttttgaacgaactacattttcgttaactgtttataattaatgatcaatacaccattactttgtgtaacaagcttttgattctccgctgtctgattcaattcaacaaccgcagagttcttaagctgcttagtgactgtaccggtttgttttattccatggatcgtgaacatgacaggagtagcgacctcaaaatttgcaccttcagctgacgggacaacggttgtttcgaacttaccaaatgttgccatgtaaaaacctccttgatatagttaaattataccacattttttgaaaattttcagtaatcctattttttccctaaacttctctttacaaagttgtgtttttttcttataatcttctttgtgttagttgccagcttagctcagttggtagagcaacgcactcgtaacgcgtaggtcacaggttcgaatcctgcagctggcattgaagcagtctaattagactgcttctttttttagatgatttttttagagaaaactttaaagtttctaaattttttctgaatgagaacggggaatcctttcttttctgcgcaaacatcactataatggataaagattctacagaagagagtgtgggcatggaaaatacacgaataaaaaagaatgataatcgaattgactacggtgtgatattacccgtatttttattgtgcttgattgggtttgcgtcattgtatgtcgcattgacgaatgatccaaggaatccatccgtgggaaaaaccttaggatttcaagctttatggtatgtactaggagttatcgcaattatagtgatcatgcatataaaatccaagtggttgtggaagttgactccctatatttacggagcaggattgctggtaatgctgggtctcttgaagttctatgatgcagggttagccgactctacgggctcgcgaaactggctgcgttttggctcctttacgatccagccttcggaattgatgaagattgcctttatcatgatgttggcgctggtggtcacccatcacaatgttcgtcatcgagatcgagatttaaagacggatggcttattgatcgctaaaatgttagctgtaaccattccggtcctagttttagtcatgctgcaaaaagactttggaacgatgttagttttcttagctatttttggtgggatctttttgatgtcggggatttcttggcagatcgtgatcccagttatcgccgcttttgttttgatagggggcgggaccatctttttagttacaacagatatgggacgagagtttctctataatgtcggctttaaagaatatcagtttgcacgtatcgattcttggttagatccgtttcacgatactcaaggccagtctttccaactagcttatgctttaatggctattgggtctggtgggatgttcggtaaagggttcaatgtgagtgatgtctacgtgccagttcgtgaatcagatatgattttctctgtgatcggagagaactttgggtttgtcggcagtgcctttgtgattttattatatttcattttgatttaccgaatgattcgggtttgttttgatacaaacaatgaattttatgcctatcttgctaccgggatcatcatgatgatcttgttccatgtctttgaaaatatcggtgctaatattggcttattgcctttgacaggtattccattacccttcatcagtcaagggggatcggcattattaagtaacatgatcggcattggcttgattttatcgatgcgctatcaggctgagagtacaccaaaaaccttgtaaggagatagctatgatcacattttactggtatccgaaatgcagtacatgtaaaaatgcgaaagcttggctagaagcaaatgggattccctatgaggccattgacatgatcaaagaggtgcctacgaaggcgcaattgttacaatggatcacctctagcggcttgccagctcgccgcttttttaacacaagcggaatgaaatatcgtgaattaggtttgaaagagaaagtaccaacgttgtcgaatgaagaagccgcaactttgttggccacagacggcatgttgatcaaacgcccattgttgattagtgaagatcgctttttgatcaatgggtttaaagaaaaagaatatgaaggagtcttgttagaatcatggaaaagaaatgcttgagaaaaaaagataatttgtgggtactgttcaatggcaaagaatactgtgttggtttgacaaaagaagcacaagaagaattaggtgctgtgtcttttgcttctttgaaaaaagttggtacagccttgaaacaaggagatacgctagtggagttggaagcagaaaaagctgtcagtgaatttccaagcccattaacaggcgtgatttcttctgtaaatgaaaaaatcgatcaaaacgttgatatcttaaacgacagcgatgaaatgaacgcttggctagtcagctttaaagatgttgatccaagtcaatttgacgaattataaaacaagatccaaccactgatttacaaaaagaattgacagcagattgagacgttgctataatttgctcaataaatgaatgctttgaaaagaagagtacatgttcttgacgtacacagagagccctgtttggtgtaaatgggcaacgaagagaagatggaagatggtctttgagcaggatgggtgagtctaaggacaagcctatcacgggatgcacccgttactgtgcaacagtatgcgaagaaattcaagtactggaagaggctgttgatgcgagtcgacagtaaatcaaggtggtaacacggaagttgtgctttcgtcctttgtaacagtataatgtacaaaggatgaaagctttttttgtgtttaactagtgaatgaataaagaaagatgggaaatttatggcattaatcgaattgacccacgtaaagaaatcctttgacggtaaaagtggcgcagtccatgccgtcaatgatgtttctctgcaagtggaaaaaggcgatatttatggcatcgttggttattcaggtgccggcaaaagtacattggttcgtctattgaatggattagaacttccttcagctggtgatgtagtgatcaatggtcaaaatattttagccttgaagaacaaagaattacgagattttcgtaaaaaaattggaatgatttttcaacactttaacctcttgtggtcacgaacagtattggaaaatatcgaattaccattggaattggcagggatccccaaaatcaaacgccgcgagcgggcacaagagctggtaaaacttgtcgggttagaaggacgcgaaaaagcttacccttcccaattgtcaggtggccaaaaacaacgggtaggaattgcccgtgcgttagcaaatgagccagaaatcttgctatgcgacgaagcaaccagtgctcttgaccctcaaacaaccgaagaagttctggatttactgctgtccatcaacaaaaaactgaatttgacgattgtactgatcacccatgagatgaacgtgattcgcaaaatctgcaataaagtagctgtaatggaattaggcaaaatcgttgaagaaggttccgtacactcggtgtttcgtcatccgcaacaagctgtgactaagcgctttgtgcagcaagatttggagccagaagaagatcccgaggaattgcgtcaagcctttttaagagaaaatccccatggccgcttagtgacattgacctttacggaagacaatgcgaatgaaccaatcatttcgcaagcgatccgaaagtatctgattgatgtcaatgttgtttatggcaagattcagcaaacgaatgaaggctcttttggcgcattaaccgttctattgaccggtgaaacagcagaaatcgataaagcattgcgcttttttgcgcaagaacaagtaggcgtggaggtgatcgagcgtgggtaaatcattttcagaaacctattttgattttgaaaaaatcgattgggcaaacatgcaacaagcgacgatcgatacgttatttatgacattcttctctatggtactagtcattgtgattggactaatactaggattggctctttattcattaggtcgcaagcaaacatttggatcacgctttgcctataccttagtctcgattatcagtaacgtgtttcgttcaactccgtttatgatcttgatggttttgattataccgtttacgacactattggtaggatccttcttaggggcaaaagctgcgattccagcattggttctatcagcagctcctttttatgcacggttagtagagattgcctttcgagaagtaagtccaggtgtgattgaagctgccgaggcgatgggagcaagttactgggagattatttataagattatcattcctgagagtgtcccagcattgatttcgggcatcactgtcaccaccatttcaatgattggttacacagctatggcaggggcgatcggtgccggaggccttggttcattggcttggcaagaaggctttcaacggggaaattacactgtgacgcttgtagcaacagtgattattttaattattgtctttatcttacaagcaatcggcgactttttgacaaaagcaacagacaaacgctgattggctgaaaaagaaaaacatcaaacagaaaattgggaggaataaaaatgaaaaagatttttggttttgcaacaacagtattgttaacagtcgctttagcagcctgcggtacagattcaaataacagcgccgattcaacatcagctaggggagaaaacacgaaattggtggtgggagcatctgtcacaccccatgcagaaattttagaacaagcaaaaccattgttggaaaaagaaggaatcgatttagaaatcaaaaccttcgatgattacatcttgccaaacaaagctttagaaaatggcgatatcgatgccaactatttccaacatatcccttacttgaacaagcaaattgccgataatggctatgactttgttaatgcaggagcggttcatatcgaaccgatggggttgtattcaaaacggatctctgacatttctgaattagctgaaggtgcaaccgtgattacttcaaattcggaatccgattggggtcgtatcttaacgattttacaagatgctggtgtgattaagttgaaagatggtgtcgatgctgaaacagcaacatttgatgatattgctgaaaatccaaagaaattagaattcaagcatgatattgatccttcattattggcaacggcttaccaaaatgatgaagcagacctagtggccatcaatgcgaactttgcttttgggatcgacttgaatccagcagatgattctgttttattagaagcggataattcaccatacgtcaatgtgattgccgtacgcagtggcgacgaaagcagcgataaaatcaaaaaattggttgaagtgcttcactctgacgaaatcaaagactttgtcgaaaaacaatggcaaggttctgtgaaaatcgttgatgcggacgctaaatagtttccttcattgagcagtacaaacagagcagtgacataagttaaaaacagacgaaacttactaaatgataaagagatttgaccttcctcgcaatcttgcgtcgaagacctcctgaatcgcaggagtaatctctttacgtttcggttaggtggtttgtttcatacttttgtcactgcttttttttaattccaatctagcaaaacagaacggttatgccaaatcatttcatacagcagcggcaattcagggtgcttttttaataattgatcgtagtgggggagctggctaagaaacagacgaatgagtgtgagggtatcaggtgaaagtgatccactccctttaaacaagatcagattgccttccaataaagcacagagcaagtggatttgagtgattttgacaagacagatttgaaaggagtcacttcccagacgttctttgagcagttctgcagcaaatatttggttcagcaagtaggtatcttcttcagataaatagaaggcttcaagtccaagtaattgtttccataagaaaagatagttgcgttcatggcgcaaataaaaggcagggacaaagttttttggaaaaactgtagctaatgcgatcccattttccagcggataaaccgcttttcttttttcatggattgttttgatacaaaagaaggcctcactggaactttttatcaagtgtggacgcatccagcgcaacaattgataatggaaaaaacggatttgtatttcgttcccttgtaaaagtggaaaatgcttgcgattcagagataagtgatacgctgccaaagaggatgatagagcagtgaaacgtcgattgacactggaagggctcaggtggcattttctgcataataatggataagtcaacgaaggttcttccagctgggtgttaagaatacggtagttactgctcttttttacaagagaagcgatgactttttttttaactcagtaaccgacattgcttccgtctgtaaataatcaagttggccttttttaatcaaaaatttgattggtaacttgatacctaactcgctggcgatcatccgtctaatagtcttgacggagatcccttgttgcagggctgcttgttggagggggagcggcctttctttgaaaagactacggatcagacgcaacatgcgcaacacttctttctcgagaaaatcctccaagttgtgaatcacctctttcggatgagattacatttattatagtggataactagtttcttggtttttttagaaaagaataatcatcaaagtttaataaataattttcactacaaagagacagatgtggagctaaccagcttaaaagagaaaaaaatgaagaaaataaggaaaaaaacagggattctggattcatagtagggaatgatggaaggggaaattgggtgatcctgcaagcagtgtcgcttaaaagcagactcaaaagaaccgcacaactgaatagctgaaaaatagtagggcaacactaaaaaactactaggctaagaataccttaagcctagcagaaagtgtctagctatccctccctcgctggagatttggtacgtaatgcagagaaataaattatagaaaatcagcttgcttcactaggcaataaaatggtttggcgctgaccatcatcataggcataaacggtttgaggcaaatactcattgtaagcaatcggcagatcgatacacatcccagcacggcgatcatcttgtgaaaaatgaatactaacacggccgtcattattttttacgtgaaaagttaatagattttctaacggaataacgcctttcagatccaagtcaatgatcagccataaactatcgatcaattctcccggcatggtttggacgataccgccagaagcatagcggctgcggctactgtcaaatggttcaaacatggttgttccctccttgaggataaagtcggtcgtgggtcggcaatcgaaagatagaatcaacttgtttaaaataagaccactcctcaaggaatggtcttattctttacttgtagcaaaaattattcttgatcttcaccaataacagctggttctgctgcttcaccgttttcgtcatcttctgaaagttcttgtgcttcagcaacagcaacgatttgttcttcggcttctgtgacgatcgtataatcatcatttttctctaaatcgcctacagtcaacgcgtcaccaatttcaagtccagtgacatcaacttcaatacgttcaggtaatttatctggtgttgcggatacaacgacactgtataagttttgtgtcaatacgccgccggctttcacgcctgctgcatcaccaactaaggtcaattcagcttctacctcagtttcttcattcatatcgactgagatgaattcaacatgggtcaatgcacgagtgaacgtgtctgattgaaattctttgatcagtgtatttactttcttgccttctaagttcatagtgattacggtattcaaaccattttcacgtagcagtctttctaattccgctgcattgactgcaatcggagtactgtctacttgataaccattcacgatagcaggtacttttccttcgtgacgcaatttgttccgtaatgaacgggggcgaacttctcttttcgtaacttctaatgatactgacataactcaattcctcctaaaatttcccgaaaaaaacgggatgtttttaagcaaattttgttaactctgcacattaagtggtacgtgagtaaaaacacgcaaaagggcagttgtttacacaactgccccagaaagttttggttcaacttttctccaccaggtcgtaacgctgtgtatgagaaactttatttactttactctttaaccttacgtggaaagtcgaagaaagtcaaatgaaatgatgagtcgaggatttgcaagcaattaaatctgagctataatagccaagatggagagaaaacaatgcgtatagacaaactgatagaagagcggttagcgacctctcgcaaagaaatgaaacgtctttttcaacaagggaaagtcttggtggatcagcaaatcgaacggaacccatctcgaaatgtcgacagtcgattgcatgaaatcaaggttgctggggtactgctgcaaacaagagatgtgtattacttactcaataagccagcgggggtggtgacagcaaatatagatcaccagcacgccacagtcattgatcttttacagccagaagaccgacaggcgacactttatgcagtgggacgtttggatcgcgatacagaaggattggtattgttgacgacgaatgggcagttaggctatgaattattgcacccaaacaagaaagtgccgaaacgatacgatgtcattgtcaatggtccggtaacagcggaagatgtggctgcttttgctcaaggcatcgtttttcatggaggtgtcgtttgtcagcctgccaaattgaccatagagatgacttcaggtaagcggtcctttgttcatctagagattgctgaagggaagttccatcaagtgaagaagatgtttttagcaagagggaaaaaagtgattgccctaaaaagagttgcaattggtcctttggaactaggggatctattgtccggagaataccggaatctcacccaatttgaattagaaagcctagcgaattattttcgctgagaaagaggagactatgacttataaaacactgttatttgatgtcgatgatacgattcttgatttccaagatactgaacatgaagcgctgacagctctttttgcggaacaaggtctgacgatggatctcgaaatgaaacagacttatcaagaggttaatcacggattgtggcaacaatttgaacaagggaagctgtctagagaccaagtagtcaatgaacgatttggcttattttttaaaaagtatgggcgaatcgtcgacagtgaagcgatggaaaaacactatcgttcttacttggatcaagggcataaattattaggcaatagtcagctagtgttggccgaattggctgacaagtttgatttatatgttgtgactaatggtgtctctaaaacccaataccgccgtttgtcagatgctaagttgatgccttattttcgggatatctttgtatcagaagatacaggttatcaaaaaccaatgaaagaattctttacctatgtttttgaccggattcctaattttgaacaacaaaaaacagtcattattggtgactcattgtcttcagatattttgggcggacatttgtcagggatcgatacaatctggctgaatcctaacaaaaaagcggcttcaacagttctcccaacctatgagatccagtcgttggatcaattgccatcgttattaaaagactgatttcttagaaatgaatagtaatttttcagaatttcgctataatagaaacagtgtaaattttagagacgaaagaggttaattgaatgacgaatggcaagcccattattattggtgtgactggtggttctggtagtggaaaaacaagtgtgagccgagcgattttcaatcactttcccaatcattccattatgatgcttgaacaagactcttattataaagatcaaagcaacttgagctttgaagaacggttgaacacaaactatgatcatccgtttgcctttgataccgatctattgatcgaacatctgcagaaactccttgcctacgaaacgatcgaaaaaccggtctatgattatgtggcacatactcgcagtgaagcaacgatcattcaggaaccaaaagaagtgatcatccttgaaggaatcttgattttggaagacgaacgtttgcgagacttgatggatatcaaactgtatgtagatacggatgatgatattcgaatcattcgtcggatcaaacgagatatggaagaacgcggacgaacgctggattccgttattgaacaatatttgacagtagtcaagcctatgtatcatcaatttatcgaacctacgaagcgctatgcagatgtcatcgttccagaaggcggcgagaaccacgtagcgattgatttgatcacaacgaaagttgcaacattcttaaccgaaagctgagcatcttttctttcgaaaacacttattaaagaatttttttgataaagcagtagtttttctttatcaattatggtaaagtatacctcatgcgacgagtcgagatggtctagctttgactgaccagattgataacagaggcacaaggagcgatccacctgccggatgcagggtgtcggaatattccttttgtggagatagggtattctactagtaatagtactgtgaataaaaaacagctttgaacattcatgttcaaggctgtttttttgtctatttctgtaggggatagcgatagatcatcgattcttctccccaaggatgatagcctgtacccatcagctcaaaaccaaatttttcataaaacgaaacaagatctgtacataaataaagggtcgagaaaccagcagtagcggcagattgcttgatagtatcgatcaaaagccgagcaccaccttgtctgcgatagtgaggatcgacatagagggcgcgcagccaaggcatcaaatccattcggctgataaaatcattcgtgatcagtccaccacagccaatgatcgaggggacagcagcggcttggttatccacgagtaggaaccattgcggtagatcggtatcagcaaaactgtgggtcaagctatcttcatacactttcatggatgcgggactcgcccattttgattgaaaataagcgatcgcttcctgtaaatattcaggatgttctcttaaatgaatgactttcatttttatcccacctttggcaaacggatttgaaaaataacgcctttaggttgtagatcacgtacactgatttgccctttgtgttcctccacgatttgtttggcgatggccaaaccgagaccatagccgccggtttcttttgaacgggagcgatcttcccgataaaagcgttcaaaaatatgtttcttgtcttcatcgctaatagatggacctgtgtttctaacttcgagcagccaatacttgttggaaatttctgacagcagtgtgatattatctccttgacttgtatatttcagggcattatccaataaaattactaatacttgatgtatttttttggggtcgaagacagcagttgtcgtagctaggttttccaagacaaattgtttattattcattttggcaatctcttgaaacggttttgccagttcttgaatgaaaggagcgatggcaatggtttctttggctaacatctgctggttggaatcgctgcgggcaatcgtcaataaatccgctgtcaatccagtcaacctccgggtctctgctaatgcttgagcaatactttctgattcctcaatgatcgtatgattgggcttagtgaaggtgcgctctaaactgttttggatgatcgtcaaaggcgtccgtaattcatgagaagcattttcgacaaattcttgctgttttttccacgaagcgaggatcggccgcattgtcaatgaagaaaggtagtagctgataccgattgacaagatccaaaagaaaatcatcgataaaatcaaaattgtttgaaagttgttcattgcattattgatttggttggtattggccaacacttgaacataggctacccctgattggttcgtaggcgcggcaaccgtgatcgagtgaaacagcaaagtctccgcttcattttgatcgcttacggtcagtgattgaatcgtatttaaatgttccgtatctaatttgagtgaagctagctgagagaaacgtccgcctaatgattgtttgtttactatcgtaccgtcttctgaccaaagaataaattgggtgttgaaacgattggttccaggaatctttggcattgctgtattgggcggtaaggcaatggcttcgttttgattagcgttgttgatctctgcttggaccagacgtgtatcttggacggcttgttcaagggcaatatcggtttcttgatatgcagattgatcaaataattctagtacaatgattccgagcaatgtaaagatcaatgcaaaagcgctgatattgatcaagaacaatttaagtcgctgtttcttagagagttctttgttcattcgctaatctccttgcataatatagcctacattgcgcagtgtccggatctctttatcaataccagtatcccgaagatgtttgcgtaaattgctgatgtagacctcgactactgtgatcgttgtttctgaatcaaatccccaaatacggtcaaaaatttgctctttcgtcaaaataatgcctcggttttgcaaaaaataaacgagtaatgcaaattcttttccttggataggtaatagcttttcgtcaatcgttacctcattagtagagagattgcaggtcaatcctttatagaccacttggttttcattaaataaacccaatgaacgttttaacaaggctttgcaacgcatcaataattcttcccgataaaaaggttttgtcaaatagtcatcggcgcctttttgaaagccagcgaccttatcttctaatccatctttggcggttaagatcaagactggtgtctgaacagtgtgctgtcgtaattttgccaatacttcatagccattcatttctggaagcatcaaatctagaatgatcaaatcataaatcccactttgggcttcatacagaccttcactcccatcaaaagcttggctgatttcaccaatttctgcaacgatttctttaatattttctgataacgttctgtcgtcttcgatcagtaataacttgatcattctgtcacctctttcattataagcatagcatgagtaacataaaaaaaacttaaaaaagtgatttttgcttaagctgtctttaagtttcagcgtcttaaatagggactatagcaatcaaaggaggaaaataccatgaaattaaaaaaggtatttcaacgaaaagaaaccaagtatcttttatcgtctgagcagtttcagccgtttctgggtgcgttgcagcagaggatgaagattgatgaatatggccaacacacgattctatctctttactatgacacggatgattttcgtttcatccgtcattcgatggataagccaaagtataaagagaaatttcgcatccggagttatggtgttccatctcaggacagtttggtgttcctagaaatcaagaagaaagtcaatggcattgtatataagcggcgtgttcctctaagctattcagattatcaatcatggatacgaagcggggaatttcctaccactattcaaccacttcaaattgccgccgaaattcgttggctatttaaacaaaaccatgacttaagtccgcgcgttttgattgcctatgaccgcctttcgctttttgcatcagaagacagtgaatttagagtgacctttgatcaaaacattcgttatcgggaaaacaatctgacattgtctgaagggagttatggacaattgatagcgccagagattggtgtgttgatggaagtcaaagcaatgggggcctatcccctttggtttgttgaacaattgaatcagtatggtgtgcgcaaagctagtttttccaagtatactcaaacctaccaacgtcatttgtttaaaaaggaggatattcagaatgttatctagtttgttaagtgataccgctactcttgaatgggatggcttgattatttgtattagtgcctcactgattctgggtctcttagttgccggagtgcatatggtaaagaatgtttatacaaaaaattttgtcattacgttggcagtactgccggttctagtacaatcagtgattatgctggtcaatgggaatttaggaactggggtagcgattttgggcgcattcagcttgatccgcttccgttccgttccaggaggttctcgcgaaatcaccagtgtgttttggtccatggggatcggcttagctaccggtatgggttatgtcggttatgtggtggttttttcattcgtggtagctgcctttttattgatgctgtataccgtaccctttggcgaacgacgtaagacgagcgaacgggaattgaaaataactattccagaagacttagattatccccaactgtttgatgacatttttgagaaatttactcatacagccaagttggattcggtacgcacaacaaccatgggtagtctctacgagttacgctatcacttagtattgaaggatcaaacacaagaaaaggctttgatcgatgatgtacggacgcgtaatggcaatttacctgttgtactcggtaaagttgcggctaatcgtgatgaattataaggaggaagaccaatgaaaaaaatctacccattgtttttggcactgttactggtagcttgtgcgcagcaatctgaaacaaattcttcaagttctgccactggaacttcggaagcaacggttacgaatggatctacttctttggaagatacagattattatggaaagtatgaagaagaggatttggatgcttcttatgagtcatcttcagccatagcgataaaactggcgggttcacaaacggaagctggagaaggatttacagttgatgatcaaacagtaacgattacttcggcagggacatatatggtcagcggttctttgacagatggtcagttgaaaatcaacgtcgacaaagaagccaaagttcatttgatttttgctggagtaagtatcacgaatgctaacagttcagcagttgttatcgagcaggcagagaaagtcattacgacattagctgcggatacaacaaatacgttaacggatggaacgagttatacctttgcagaaggagaaaccgaaccggatgctgctttttatagcaaagacgatttgtcgatcaatggagaagggaaattggtcattgaaggcaattatagcaacggtatccgcagcaaagacgatttagtcttggcaagcggcacctatgaaatcacagcaaaaaacaatgcgatcaaaggaaaagattcggtgtcgattcgagatgggaattatactctgacgacttctgaaggagatggtatccaagccaacaataccgaagatgctacaaaaggctatattgggattgatgggggtatatttacgatccaaagtggtcgggatggtatccaagctgagacaaatcttagtattcaatcagcagaaatgaccgttaagacagctgatggtgcagatagtcaagcggtcgtcgctgatgaaagttataaaggaatgaaagcaggtggatccatcctactagcaagtggttcctatactatcgatagtgcggatgatagtatccaagccaatgattcagtcaccatcaatggcggggagatttcagcagcgactggagatgatggcattcatgcagacaatggtttaaccattaatgatgggacgattattgtcaacaaatcctatgaaggcttagaagcaagcgtcatcaccattgctggtggagatattcaagtgctagcaagcgatgatggggtaaatgccggcggcggcagcgacacgacggacagcggacaatttggacaagatagttttggaggaggaccaggcggtggcgatcaagcagacgatagcaaagaagttgtcatcacaggtggaaccttgtcaattgatgctgaaggagatggattggacagcaatggcaatgtcacaatgagcggtggaatcgtgattgtcaatggaccgacgcaaggcgggaatggcgctttagattataatggaacctttgaaattacaggtgggaccctcgtcgctgcaggaaccactgatatggcaatgaatgtgagtggcggaacacaacgatcagtggcgattactttcgatcaatctcaggcagcagacacgttgatcaccttgcaagatactgagggcaatacgttattatcctatgcacctagtaaggattttcaacatgtggtgatttcaagtccagatttacaatcagcagactatacactacttagtggcggcagcaatagtgaaacttctgtttatggtctttatcaaggaggaagtgtgaaggatgcttctgaattaggcacattatctttaacagataccctttcaaatttgactcaatctggcgcaactgccacgacaaaccaaatgggcggatttggacgctgatcaattctagtagccctcgttggaggaaccaaagaaagaatactacgaacgatgaccgctacaacttagtttattcttgctatacatgattggtaaaaagccattaaagtgtaacattctgaaaggatattctagccctccatttccgagattgaagcagacagtgtctaaagatatcgtggatagaccatgcctattttaaggtgtacttaagctagtaaacatatagtcaagctacgtttagtagaggaggatatgagatgaattttatgaaacgcggcttacaaagtttgtgggcaaagaaaggtcgaagtttgctgctaattgctgttttttcggcaattttgatttttgttttagcaggattgacaatccgcagtgctgctttagtcgcaaccgaaaacgcacaaaaaagcgtgggagcgacggtgacgctgcaagccaatcgggagtctcttcgacaaaacagccaaacagcttcttcagatacttcagagggggagtcgacaccgcccgatccaggcagtttccagaatacaccggtaaatcttagtgatgctcaagcaattgcagcgttaagtggggtagcatcctatagctttgaagcgagtacatcagccgatgcggtcagtggcattgaagctatttcaagtgaggataacgaaagtacagcgacagaatctacggaggattcatctagagcaacgaatggccagccaagtgggatgcctaatatgcaaggaggcagaatgagcagcggcgattttcaaatcactggtgtttccgaaagtacgaactatacaagtttttcagaaggcaccgcgaaaattaccgatggtgaagccatcactgcaggagatgaagggacgaatcatgtcttgatcgaatcagaattagcagaagcaaatgggctttcagttggcgacaaatttgttatttctgatagtgaagacaatgaagtcgaagtaacgatcaaagggatctatgaaaccagtgaagttgggaacagtatgagccaaatgttcaattttttgaacccagccaatacattgtttgcatcctatactctcgttaatacattggcgggtaatgaggatacgttagattcggcgacttatacgttgagtgatccttcagaaatggacagtttcgttgctcaagctgaaaaactgattgataccgatacctacagtatccaaacgaatgatcaaatgtatcagtcgatgttgacaccattgaataatgttgcaagttttgccaaaaatataattgtgctagttgcggttgccggtgtcatcatattgacattgatcgtaatgttgtcgatcagagaacgcaaatatgagatcggcgttctgttatctttaggcgaatcgcgaataaaagtcattttacagttttttaccgagattgctatctgtatgttctttgcattgggaatcgctgcagctagtggcaatgttgtagggaatatcgtgggcgagcagctgttggctcaacaaacgacaacggaacaagcggacgcagggatgaatggtccggaaggaatgccaagtatgggcaacggcggtcctaatggcagaagcgggctatccgcttttacaccctcggcagaagtacaagagttagctattacggtttcattccaagaaatcggcttattggcattgttaggtgtagggatcagctttgggtccattctattatcttcagctggaattttgcgcctcaatccaaaaaaaatattggtttcctaggagggatagcatgacgttacaaacagaaaaattaggttattggtaccaaacagaatctgaagccctttttcgagaagtagatttgacctttgattctggaaaaatgtacgcgatccttggttccagcggttctggtaaaacgacctttctctcattaatcacgggattggacacaccaaaagaagggaatatttattacgataacgaaccgttgaacaaaattggattgcgagaataccgtcgtaaagatgtttctatcgtctttcaagcttataatttgttgccctatatgtcggcactggataatgtgactaccgcaatggcgattgccaagtcacaacaaacagataaaaaggcatatgctttggcaaacctggctaaagttgggataactgaagaattagctatgaagaaagttacccagctttcgggtggacagcaacaacgagtggccatcgtccgggctatatgctgtgaacatgagttgatcgtggcagatgagcccaccggtaatttagatgaaacgacctcaaaagatatcgttcaactgtttcaagaaattgcccatgaacaaaagaaatgtatcatcttagtgacccatgaacaagaagtagcgaaagtctgtgatgttgtttatgaactaaaagagcgtcaatttgtcatgcgggactcctaataaacttgttactgaaagactaaactcaaggctgtattttctcatcagagcggatacagccttgtcttgcatcttgcagcagaaacttctacaataaaaggaagggggcgagacgatgcgattactgatcgatggggatggttccccagtaaaaaacgaagtcattgaattaggtgcgcagtttgcattgccagttgtgatcgtcactagtgtcgatcactatacggccaaagaatatcctgattttgttcattttgtctatgtggataagggggccgatcgagccgactatgagattgttaaagaaattcaaccgggcgattttttagtcacacaagattatggcttagcttcacttgtattaccaaaaaaagcccgtgtttttcatcataacgggacagaatatttgccggagactatcgactttttattagggcaacggtatttaggaacacaaatgcgtaaagccgggaagcggaccaaaggaccgaaaccattcacgaaagaggatcgtcaacaattcaaacaagttctagagcaagaaattaaaaagacgatccagcagtaaccatcattgaggagactgctggatcgtttatttttttcgaaaacgatcataaaaatattttccggcaacggtgacgatggccacaaaggctatacaatagccaaagatacccatttgatgaacaaagctgccctgttggggacttgcaacgactaaaagagaggaacctaaaatcactgctgctaagataatgccaatcactagccgattgatcatttgatcaaaacggtccagcagctgtttttgatggcggatctcaatattcagacgatgcttgccagtagctagtgtgttgacagcagctaatgttcgatcagggagtcgactgagtgctcggagacttttggcactggctaacaaactttttttcatttcttcttcaagatccagctgctgcaaaaagtatttctgagcaaatggctgtgtcacttccatcatcgataattgagggtcaagtgcctcgattactccttcaagcgttccgaaagctttaatcagcagcgtgatgtcacggtgcatctgtagatgattgtcatgacagatagtgatgacttcagctaatactttttgcaaatcaatatctttgatcggcatgttgtaataattttcaacaaaagactgaagatcttgatagaaatccacttcatcgaagtttctttcccgacggcaaaggcgtaggacagctctaccaacttgttgggtatcttgagtgtacaatgcgatcaaggcatctgccagccgactgcgaagggtctggtccatatgtcccatcattccgaaatctaaaaagatcaagcgataaggcggcagtgtctcctcatcctgccattttaaggagtaatcaacaccgcctaaaacaccaactttcttttttacatggaaaggagctgtttgctgatcgggatccagtggttgcaagaagatatttccaggatgagggtctgcatggaaaaagccgtcttcaaagacttgcttcataaagttctctaccagcagggtaccgacctctttcttgatttcttttactgtccggttgggaaaaaattgttcattgttttttcgagcaagcaaacagtttaggttttctccttccatatagtccatgacgatgactttacgtgtacaccactgaggatagactttaggaatctcgatctgctgccagtggtgattgaagtgataaaactcttgcgcatttttcgtttcttgcagaaagtttgtttcattatccaatgagcgtcgaacttcatgcagaacgcttttaagatccaccacattcgtttctggaatatagcgaatcaaaggaatcgctttttcaaacaaatcgagatctacttggatagcggaaataatgccgggatgctgtactttgacaacaacttctttgccatcttttagagtcccacggtgagcttgaccgatagatgccgaagctaagggcttttcttgcaaagttgtaaaaatggctgtcagaggttgttcccattctgcttctaacagcgcctggacttgcggaaaaggatcgcttttgacattgtcttgcaagtgtttgaattcattgataaaagcgtcagataataagtcgctacggacggaaagcatttgtccgattttaatgaaggtgggtcctaattcttcaaaggctttgcgtacagcgaggggatcttgctgcttacttaaattttgaatcactttgtatttgagaaacacttgaacgatctgtctgagtctttttttcttagatggtgattcctgttccatacgggcacctctattctttaagtttcgctagtctaatagtacgaagaaatcaagaaacattcaactacggatgatttcagttgttaaaatcggcaagaaataatgtcgcagcttcgtttttgtgctaaaatgtggaagaattagttttggtagaaacaatgaatacaggaggaatttcttttgaaaattattttattatatggcggacgcagtgcagagcatgatgtatcgcttctatccgctttttcagtagtcaatgctgtatattataattactaccaagtacaattagtaatgatcacgagagatggccagtggctaaaaggctctttattgactgaagcccctacatccaaagaagtgttgaatctgacggattcggcttaccaagggacgccgatccaacctggtgagatcaaggaagaggatgcgattgtttttccgctgctccacggaccaaatggagaagatggaacgatccaaggttttctagagaccatcggcatgccttatgtaggcgcaggggttttaactagtgcctgtggcatggataagattatgaccaaatatatcttgcaggcggcggggattccgcaagttccttatgtacccgttcttaaaaactattggaaagaaaatcctaaaaaagtatttgaacaatgtgaaggcagtcttttgtatccaatgtttatcaaacctgccaatatgggttcaagtgttgggatcacaaaagctgaaaatcgggaagaattgcaaaatgcacttcaagaagcctaccgttatgatacacgagcgatcgtagaacaagggatcgaagctcgcgaaatcgaagtcgctgttcttggaaatgaagatgtgcgtacaacaatgcccggcgagatcgttaaagatgtagctttttatgattacaattcgaagtatcttgacaataagattgagatgcagatcccagctcaaattcctgaggagacacaagcgaaagcgcaagagtttgccaaaaaagcttatacgatgcttggaggaagcggcctcagccgctgcgactttttcttgacgaacaaaaacgaattattcctgaatgaattgaacacgatgcctggttttaccgagtttagtatgtacccgctgttgtgggaaaaaaccggtctgccatatggtgatttgattgaggaattgattcaattaggagtcaaccgttttaaacagcgtcaagcctttttaaccgatgtcgaataatcacaaatagggaaatcagttcaactcaaggtgaagcttgaaaggaccatgatcttccctgtttttaacttaaggagataaataagatgaatctatcgataaaagaagttgccgctttatttggcgtagaatgtgccgatcagacaatgatcagcagtatagaatttgacagccgcttggtcactaccgatagtttgtttgtgccgttggccggaacgagagatggccatgagtttgctcaacaagcacaagaaaaaggagcaatcgctgctttttggagccatccgacaatccagccgccagaaggactaatgatcatcgaagtatcagacaccctagctgcctttcaaaagctggcaaaattctataaagaaaaactggcgccaaaagtaattgctattacaggtagcaatggtaagactaccacaaaagatatggtagatgcggtggtggcacagcagttcaaaacctacaaaacacaaggaaatcacaataatgaaattggtttgccactaacgattctgcatgcaccagcggatacagaagttcttgtattggagatggggatggatcatgcgggggaaatcgaggtcttgtcacacttggctcagccagatgttgcagcgatcacattgatcggtgaagcccatattgagaatcttggttctcgtgaaggaatcgcgaaagccaagatggaaatcactgccggcttagacccagcaggatttttcatgataccagcagacgagcctttattgaccccctaccttgcagagttgactcagcaggtagaaacatttggtttgggtgaaggcaatcttaaaggaacgatccaagaagaaacccaagaacaaacagcttttacggtagcggatcaagtctatacgattccagtgatcggcggctacaatgtaaagaatgccttgatcgcgattggcatcggtcgttatttggggattgaagaagaaaaaatcaaagcaggattggctgattttcaactgacaaagaatcgtacacaatggctgaaagctgcgaatggcgccgctattttaagcgatgtctataatgcaaacccaacagcgatgggattagtcttagacagtttcagaaaattgcctctgactggcagacggatcgctgtgctagcagacatgttggagttaggtcctgattcagcgaagatgcatgccgggatggcggatcatttagatgaaaggttcgatttgatctttttgtacggtagtgagatgcaagcgttgaaacgtgcattggatcaaagccgcttagccgatcgagtccatttctttagcaaagaggaaaaagcggcgctgatcacacaactacaaaaagaactgcagcctacggatagcattgttttaaaggggagcaacggaatgggcctggttgaggtaattgattctctaacagcaatgtaaagtaagcgtgaaatcttgctgaaattttcattctgtgctatacttatttaatgccgaaagatgaagcacagaatgattactgtaaataaacattgacgttttgagataaaatgatggctgagacagaaagatttgttttagccttttataatgccttcgtgaagcggtttttcggtaacaagagaaagataagagatgggactgctcttgtgtttctgaagaaagtacgcttcgattaaagaaaacaggcatcatgatgatgaccaaattaggaggatccatttgaaatttaaagatctagaattatcaaacgaattattgacttctgttgagcgtgccggctttgaagaagcaacaccaatccaagaagcaacaattccccttgcgttgcaaggaagagatgtcatcggtcaagctcagaccggtaccggaaaaacagcagcattcggcttgccaatgttggaaaaaatcgacccagcaaatcaccaactacaaggattagtgattgcacctactcgggaattagcgatccaaacccaagaagaactatatcgtttaggaaaagacaaaaaaatccgggttcaagcggtttacggtggtgcggatattggtcgtcaaatccgtcaactaaaagatcgtccccatatcgttgtcggtacaccaggacgtatgttagaccatatcaaccgccacacattgaaacttggcacagtggaaacacttgttttggatgaagcagacgaaatgttgaacatgggcttcttggaagatatcgagaagatcatcagccaagtacctgaagaacgtcaaaccttactattttcagcaacaatgcctcctgcaatcaagagcattggcgtaaaattcatgaaaaaccctgaacatgttcaaatcaaggcgaaagaaatgacggctgatttgatcgatcaatattatgttcgttcaaaagactatgaaaaattcgatattatgactcgtttgttggatgtacaaacacctgagttgacgatcgtttttggtcggacaaaacgtcgtgtcgatgaattggcacgaggactagaagctcgaggctacaaagcggaaggaatccatggagacttgtctcaacaaaaacgaatgagcgtattacgttcattcaagagcggtcatttagatattttggttgctacagacgttgcagctcgaggattagatatttctggtgtgactcacgtctacaactatgatattcctcaagatccagagagttatgttcatcgtatcggacggacgggccgtgcaggtaaaggcggaatctccgtaactttcgttacaccaaacgaaatgagttatttgcatgttattgaaaatctaactaaaaaacggatgtcaccaatgcgtccaccaaccgaaaaagaagcttttaaggggcaattaggtgcagcaattgaacaagtagaagtgaaaatggatgaaaacgggttggataaatacctccaagctgcagatgatttattggaacgctactcagcacaagacttggctgctttgcttcttaaaacaatcgcgaaagatccatctgatcttgtccctgtgaagatcacaccagaaagaccattaccgcaaggaaagaaatctttcaataaaaatggtcgtcgcagcaacaacagcaacaaccgcaaccgtaaagacaacggcggcaaccgcagcggcaaagctcgaggaaattacagcaaagacggcgctcgcaaaaataaccgtcgcagcaatgacaaaaaacgcggcttcgttatccgcaacaatcaagactagtccttagaggtcgctttcagcacctttttcgacacaaaattatctgaacttttttcgatcaacctgccaatgtgtgccactgaccaagaggccacttggcgtgatcgatcattgttcggatattttttttgccctttttgagaaaagacggtatagtcaaggaaaactggagaacgagcctctcaaaaatttcttaaccatccattaaaccctttagttttgagtggtaattccctttttttttggtagaatgaaactaaaataaatgcagctgatgtatttaatagatagatataaaatcgtaatgaacagtcatggaataaaggttcttgctgaacagaaaaggatagaaaatgatcaaaggtatcgggatcgatgcagtagaattagcccgcatcaaagaattgattgaaaacaaaccgcaatttattcagcgtattttaactgagaaggaatctgaactgtttttcaagctgccaaaaaaaaggcagattgaatttcttgggggacggtatgcttgtaaagaagctttttcgaaagcttggggaacaggaattgggaaattgtcttttcaagatatcgaagttctgaccaacgaggctggagcgcccgttgttacaaaggcacctcaccctctacatcagacgtttgtcagtatcactcataccaatgagactgcctttgcgcaaatcttgttggagaatgaataatgccagagatagcgattcgttaagggaatcactagagaaagaaggaaagtggaatggtcgtttcaatccatagaccaacgaaagccattatagatttaaaggcaatcaaagaaaatgttgaaaatgaagtggcgcgtttgccaaaggcaacggatttatttgctgtggtcaaagcaaatggctacggacatggggctattgagacagcaacagcagctctagaagggggcgcttccggtttttgtgttgcgacagtcgatgaaggtatcgagttgcgggaagctggattcagtgaaccaatattggtgttggggatcgtttctgtggcagatatcggtttgctgagctactacaatctttcatttccagtaagtacgaacgagtggttgcaagaagcggctgctttcttgcaaaaaaatcctgtcaccaatccgctgaaggtccatttgaaagttgatacaggaatggggcgaattggctttatttctaatgaagagttactctcggctgtcaaatggctccaagagcagtctttgttcacatgggaaggggttttcacccattttgcgacggccgatcaagcagatgatacgtattggcaagaacaaaatcaacggtttcaaaccgcattggcatgtctgcctgaattgccaaggtatgtccatgccggcaatagtgctactgctttgtggcacgcagaagccgtagggaacatggttcgctatggcattgcgatgtatggattgaatccttcaggaacggcattgccagaaacatatccattgaaaccagccttgtctcttgtttctgaattggtccaagtgaaattacttgaaaaaggagccggaattggctatggtgaaacatatatcacgccgcaagcagaatggatcggtacggtaccgattggttatgcggacggctggttgcgaaaaatgcaaggattttctttattggtagctggtgagtattgtgaaatcgttggtcgtgtatgtatggatcagctgatgatccgtttaccccggtcatttcctgcgggaacaaaagtcacattgatcggcgaagataacggacagtgcatcactatgcaaaaggtagcggaacaattagagacgattcattatgaagtggcatgcacgctttctgcaagggtgccgcgagaatataaaagttagggtggtcctatggtaaaaaggggagacatttattttgccgatctgtcaccggtcgttggatcggagcaaggagggattcggccagtattagtgattcaaaatgatttaggcaatcattttagtccaacggtgatcattgccgcgatcacggctaaaatggctaagccaaaactgccgacccatattgggatctcagcgacttgtacagggattggtaaagattcagtgatcttgatggagcagattcggacaatcgacaaaagtcgactaaaggagaaggtttgtcatctagatgaatcaatcatgtgtgaagtcgatgcggcattaatgatcagtgtgggagtcgagacggcttattccacgtcgtcgattcattcatgatgctaggatatttgttattagcggcaacactgatactatttttattttatacttatcaacacttgcggcgctttttacgggaaactaaaaagaaacaagaagacgttgaaaaagggtattttttattgagccatacatatgaagatcaggaaaaagcaagttactatggtgtctttcagcaaggagaaaagacattgacattggagatgccattgcagctttacctgcacacaagcccaccgcaacgtggcgaattagtcgcgaaagatggcaaagtcattgaattcaatacgtgaatacaaaaaaactttccatcactatatgtgatacgtgaggaaagttttttgcattagcagggaaaattttagcagaaacgataaattaggaaaaagagcccagtgtctagaacaagatcgttcagtcttttatctttttttatattctgagatcagagtgttgcattcgtaattctactttcaacaagcctcggagatgagttgctttatacgcaaaattcagttatagtatgtagcgactattttgaaaagaggaagcaatgtgaaaccttcaatttatggattaaccaaagagtccttatctttgtggatgactgagcaagaagaaaagaaattccgcacgaatcaagtgtgggaatggttatatgagaaacgagtagcgacatttgaagaaatgaccaatttgcctaaatcattggtaactaagttaaatgaatcgtttgtgatcaatcctttgaaacaaatcgtcttacaagaagccagcgacggcacagtcaaatatttgttccagttacccgataatcatatgattgagaccgtcttaatgcgtcaggaatatggtatgtcagtctgtgtgacgacacaagtcggctgtaatatcggctgtacattttgtgcgagcggtctgctaaaaaaacaacgagacctaactgctggagaaattgtcgctcagatcatgctggtgcaacattatttcgatgaattgaatgctggagaacgtgtctcccatgtggtggtgatgggaatcggcgagccttttgacaattacgagaatgtcatgcagtttctgcagattatcaatgatccgaaaggactagcgattggtgcgcgccatatcactgtttcaaccagtggtttagctcataaaatcaaagagtttgctgaaaatggcttacaagtgaaccttgcgatttcactccatgctccaaataatgaagtacgaacttcgatgatgcggatcaaccgcagtttcccgattgaaaaactaatggaagctattgactactattttgaaaaaaccaatcagcgaatcacgtttgaatacatcatgctggatcatgtcaatgatcgaccagagcatgcgcggcaattggtcgaattgctcaagaataaacgcaagctttcttatgtgaacttgattccttacaaccctgtcagtgaacatgatcagtatgctcgcagtaagaaagaagatgttttagcattttatgacatcttgaagaaaaatggtatcaactgtgtgattcgtaaagaacatgggacggatatcgatgcagcttgcggtcagttgcgcagcaaacagatgaaaaagcaagtcactgcctagaaacaaataagtctgaccatgaaggcgggaaagtcgctcattgaacagacttttatcaaaaaacggtacaggagaccgttttttcaaaatcagaaaagtaggtgaacggcactctttgttgacagaccgctgaaaaaggccagctctgagacaaagacgggtgcggttcctgcttttgctgatttttttatttcagaaaagaactgttttggataacaacaaaggaaagcgatttctctggattttttcaaaattccgatactcatggcttgaaaaatcgtctatactataagaattgatagaaataaaaataacacacatgatgaaaggatgattccatggaatggatcaaattgattggtattttggtaattcttgtcggctttttgctgaaactcgacacgatcgccgttgttctgatcgcaggattagcaaccgcattagtttcggggatagattttactgatttcttatcaatgttaggaaaggcatttgtagacaatcgtctcgtgaccttattcctactcacactaccaatggtaggaatctcagaacgctttggattgaaacaacaggccgttgttttgattgaaaaaatcaaaggattgaccccaggcaagtttttaagtttgtatttgtttattcgagaactagcaggtttcttctcgattcggattcaaggacacacgcaatttattcgtccaatcgtaaacccaatggcgcaagccgcagcggagaacaagtatggcgaactagaagaagcagatcaggaaaaaatcaaagctcgggcggcagctaatgagaactacgggaacttttttgcccaaaatacgtttgtggcggcttcgggtgttttattgatcactggaacgttaaaatcattgggttatgacgtagccgccagtgcaattgcacaggcttcaatccctatcgcgctgatcgttttagtcattgctaccctttcaaatctggctttcgatcgcaaaatgtctaaaaaatatggcgaaaaggaggaaaagtaaatggaagcaatcatcaataatattttagaattcttttatattttgatcggtctcttgtcaatcatgactgctgttcgagtctttaaagatgcgacccatccaacacgactgggtacagcaacattttggcttttacttggtatcgtttttgctttcggaaactttattccttacatcattgatgggatcatcattatttgtatgggcgtattgacgttcttcaagcaagttcgaattggtaaaatcgtggatgtcgatgaacaaaaagcagaacaagccgccgaaagaatcggcagtaagatttttatcccttgtatctcactagcagtcatcgcagttgcgatttcctacacacctttaggcggacaagttgggatcgggatcgcttctgttttggcgttgattttagcaatggtattgacctctgctaaaccaaaaacagtgctggatgattccgatcgtatgttccaacaagtcggtactgctggtatcttgccacaattactagcggctctaggcgtgatttttaatgctgctggtgttggagaagtgatctcccatggtatttcaggtgtagtacccgaaggcaatcgtttgattggtgtgattgcctattgtttaggcatggttttatttacaatgatcatgggaaatggctttgcggcatttactgtcattactgccggaatcggtgtcccattcgtaatcgctcaagggggagatcccgttgtagcaggagcactggcgatgactgccggtttttgcggaacattgttgacaccgatggcagccaatttcaatgcattacccgtcgcattactcgagatgaaaaattcgaatgcagtaatcaaaacccaagcaccgattgccgtgctgctaattgtgatccatatcggattgatgtacttttgggcattttagtggtaaaaaggaatagaaaggatgatcaatatgaaatgtttagtcacaggatttgatccatttggcggagaagaaatcaacccagcgttggaagctgttaaattattaccagaagaaatcaacggagcaaagatagttaaattagagattcctactgttttcggcaaatcagctgaagttgtacaaactaaaattgaagagatccaacctgatgttgttttgaatattggacaagcaggcggacgttttgctatttcacctgagcgagtggcgatcaatgtcgatgatgcacgtattccagacaacgaaggcaatcaaccagtagatgaagccatccagcctcaaggtcaacctgcttatttcagtcagttgccgatcaaagcaatggtagctgcgatgaaagaagccgggattcctgctgttgtttcaaatactgccggtacatttgtctgcaaccacatcatgtatcaagtacaatacatgatcgatacaaaatacccaacgcttaaagggggcttcattcatgtcccattcgttccggagcaagttgttgacaagcctggtcaaccggctatgagcttacaagatattgcgaaaggattggaagcggcaatcggtgcgattgtcgattatcaaggaaaagaagacatcaaagcaatcgggggcgccattcattaagcggcacgaacagattgtcaattaaaacgaattgatttaacgatagatagatcagacaactaggaatataacttgtaagaggataggttgcttgcgagaataggccgatgttgtctgatcttatttatttcaagtaacgagcaagtatgaagcgcggaaagtcatttattcgtctttttatcgatttattgatagaattcatctagtggaacacgcgaaatgcgaagggggcaaatcatgatcattactgaatttgatagagagaattatattttacgtgatcagctgatcgacttagccgttctaatttatccgtctacctatcaaaaagagcagcggacagcagaagaattactgcagccgaataaagttgtcattgcagctattgaaggagagcaattggtcggctttgtgagtgccttccaaaaaagcgacactatctggcagcaagagatcagcttagttgatccccgacatccagatgaacaaataggtgagcgtttgactgcctttttgcgagacgaagttgttgctgctggcggagaatggctagtttcttaagtcttctagttgaacattgcttgtcaaaacggacacagacagttatagtggccaagatgtttcttaaaactagtcaagagttggaacataagttgaaacaaatgatatccgaatgatcaaaaatgaaggtcgcaagaatcatcaagattagcgacaagacacggctgtaaagtgagtgtctttcattgattgttcggatatatgcttgttttttgtaacttatgacacaactctttttgttttttttaaaagaaaaaatggtctttaaaataaaaatgagaagaagatgaaagtagcatatttattagttttctagtaatatttagtagaaattcttcaaagttattgtcttttatcgtgttttttaatgctaaaaattgtaaaaaaagattgcttttttaataattattaattaaaatctaatctaacttcagaaaagagcgattattctgaaaattaaatcaattaaggagtagttcaggatgaaaaataaatgggcatatggattggttgctgtgtgcggcttagttttagcaggctgtaccacaggtggttcaaataattcaagcagcggatcagctgccagcagcgaaagcaatgcggaacaggtattcaatgttgtggttcaacaagaaatgccaagtgccgatttgtcccttgcgacagatacaatcagtttcagtgcgctaaataatgtatatgaggggttgtaccgcttagacgctgacagcaaaccgcagccagctggagcagcagaagaagcagaagtcagtgaagatggattgacttataagatcaaattgcgtgatgacgcaaaatggtcaaatggcgaacctgtaacagcagctgattatgtctatggttggcaacgaacagtcaagcctgagacggcttcagagtatgcctacttgtacgcaccagtaaaaaatgcggaagctatcacagccggagagaaagatccgtctgaattaggaatcaaagcagttggcgatcatgagttagagatcacattagaaaaggccactccttactttgactacttgctggcattcccatctttctttccgcaaagtcaagcggttgttgaagaacacggggatcaatatgcggcaacgagcgacaatgccgtttataatggaccttttgttcttaccggatttgatggaccaggaaccgataccgaatgggcatacgaaaagaatgatcagtattgggataaagatacagtgaaattagaaactatcaatgtgagtgttgttaaagaatcagcgactgcattgaacttgttccaagatggtcaagctgatgatgtcattcttacaggggaacttgcacagcaaatggccaatgatgaagcgtttgtctctcaaccagaagcaacgacctattattttgaagtcaatcaacgcgatgaaaaatcaccattccgcaatgaaaatttacgtaaagcaatttcgtatgccattgatcgtgacgctttagtgacatcgattttaggggacggctcaattgcttcgacaggtctagtaccagaaggcatgacctttagcccatccgacaatactgattttactaaatcagcaggcagtgttttagaatatgatgaggccaaagccaaagagcattgggaaaaagctaaagaagaattgggaatcgattctcttgaatttgatatcttagcctctgatacagattctacgaagaaaatcattgaatatgtacaagatacattgcaaaaaacattggatggtttaacagtaacgttaagccccgtaccattctctgttcgtttggatcgttccaacgctggagactttgatatgttgatgggtggttggggagctgactatgcagatgctagcagttttacagacttattcacgactggcaactcatataaccgtggtcaatggagcaatgaagagtatgatgccttgattaaatctgcaagtacgactaacgtcaatgacccagaaaagcgttgggaagatttagtcaatgcggaaaaactaatcatgagtgaacaaggagtaatcccagtttaccaaaaagcagaagctcatttacgtgcaccaaatgtaaaaggtgtcgttgctcatgcagcaggcgcacaatacgattacaagtggacatcgattgaataaccacttgaatgcctagcggctgggacagtaactggatacaagatgacgattatcgatgaatagctggaataacaggcataacaaaaatggagaagctgctgcttctccaaaatgccaagtgcttcactatttgtcacgtatggaaatcttctcttgaatacagtctcagccggcttttttttctaaagcagaaaggcagtcgacaaaagacacgaaacgataggttactaaattaaagagtattgattaataaaaagagcaaagaaagtagcagtaaaaaaattcctggccatagccaaaagccgtagctttgtttaccaacatcggagagtttaaggtaatcggttttatttttggaaaaagcttttttcattgaatattggaaatgatcaaagaacccagaggcaaagacccaaagaaaaccgccgatgatcaagaagaataaagcccaaagaaatagtgcatccgagatagttgacagggtcaattcctttttgaaaaacaaccagctaatggaaataagggtacatatgagggcgatcagcccactacttttttttatccgcataagttgactcctttttaatgattcgtactacttaatttacataattattgataagaagtcaaaatacctagggggaagacgcgtgaacggttttttgaaatatttattgaaacggatattctatatggtattgaccttatggttgattgccacgatcacatttttcttaatgcaatttttaccaggaacaccttataccaatgcagaaaaactgagtcccgaacagattgccttattgaatgaacaagcaggtttagataaaccgatgattactcaatatgggctgtatttgacgaatttagttaaaggcgactttgggatttcattccaattcaaaaatcaaccggtagcgaatctattatctggtcggattggtccttctttacaattggggctgcaggcaattatttttgggacttttttcggtatcattttagggacgatctccgctatgaaacaaaatacatggattgatacgacgtcaacgctagtagcgatcttgggacgttcgattccgaactttgtctttgccgttttgctgcaatacatttttgccatcaaattaggtgtcttgccaatcgccaaatgggaaacttttgcaagcacgattttgccaacgatcgcattagccatgtcgccactggcagactctgcccgctttattcgaaccgagatggtcgaggtgctccacagtgattacgttgagttggctcgtgccaaagggctgagccgctgggagatcgccttcaagcatggtttgcggaacagtttgatcccgctgcttaccttgttaggacctttagccgttggattgatgacgggttcattggttgttgagaatatttttgcgattccggggattggcgaacaattcgtaaaatcaatcatgacaaatgattatccaacaatcatggcagtcacgattttgtactctgccatgttagtatttgtgattttagtggtagatattttgtatggtatcgttgatccgcgtatccgtgtgtcagaagggagccgtggctaatggaagagaaaacaatcaatcaagtagctgccattgatgcagccaaatttcagccgttacaaaaaaataccaaagaagaacgagaagcaattgctgcgccatcgctgacctttttccaagattcatggcgccgtctgaagaaaaacaaagcagctgtattttcgatcgtactattgctgatcattattgcaatctcgattattacgatctttgtttctccccatgaccctactgcgcaaaacgtgaagttcacgaatctgcctcccaaaattcccggactcaatctcccaggattaaatgggtatgcaatggttggtggtgaattggttgataaatatgctgctgccaatgttccagaaggcacttactatctactaggaaccgacggactaggacgggatctgttgagccgtttatttgtcggaacgagaatctcgctattgattgcctttattgccgctttgctagatatcatctttggcgtgacctatggattgatttccggtttattagggggacgagtggataatatcatgcaacgtttcttagagatcctttctgggattccgaatctagtggtgatgattttgatgctggtcgtcttcaaaccaggaatcttttcgatcgtagctgcgatggctatcaccaactggattccaatggctcggattgttcgcgcgcaaacaatgaaattaaaagatcaagagtttgtgctagctgctacgacattaggtgagagccgtatgaagattgcgatgaagcatatcttgccgaatatttcgagtgtgattattgtccaaatgatgttcagtatcccatcagcgattttcttcgaggcttttctaagttttatcggtttgggcttaaagccgccttcagcatcgctagggatgttactgagcgacgggtacaagacctttttattcttgccttaccaaatgtgggtgccggcggttacgttgtcggtcattatgatcggattcaacttacttgctgatggactccgtgatgccttcgatccgaaaatgaaagagtgattgctatggaaaaagtgttagaagtgaaaaatttagagatctcctttgatacctttgcagggaaagtccaagcgatccgcgatgtcagtttcgaactatacaaaggcgaaacactagcgatcgttggcgaatccggtagtgggaaatcagtaactacccgcagtatcatgggattattagctagtaacgccaatatagataatggagagatcctattcaatggaacggatattctcaagaaatctgagaaagaactacaaaagattcgcggaaaagaaattgcgatgatcttccaagatcccatgacttctctggacccgacgatgcccatcggcaaacaagtggccgaatctttgatgaaacataacaaacttagtaaaaaagaaggactccgacaagccttggatcttttgaatctggtagggattccgaatgctgagaagcgtttgaaaaattatccgcatcaattttcagggggacaacggcaacggatcgtcattgccatcgcattaatctgttatccacagatcctgattgctgatgagccgactacggcactggatgtaacgattcaagcccaaatccttgagttgttgaaagatatccaacaaaaaatcaattcatcgatcatttttattacccatgatttaggagtagtagcaaatgtggcagatcgggtagccgtcatgtatggcggcaaaatcgtagaggtgggaacagcagaagaaatattctataatccacagcatccttacacttgggggctgttaggttccatgcctaccttggaggggacgggggatcgtctgtatgcgattcctggctcaccaccagatttgttggatccgccgactggggatgctttttatcctagaaatgagtttgctttgcagatcgatgccgaacagcaacccccattctttgatgtttcaccgacccataaagcagctacgtggcttttagctccgcaagcacctaaggttacccctccggatgaaatcttgattcgttggaaaaaattccaagaaaaaactagacaggcatctgtataaaggaggagaacccattggagaaagtgttgcttgaagtaaagaacttaaaacaatattttaatgtcggtcgcaaagacgaagtcaaggctgtagatgatatctcctttcagatctatgaaggagaaacctttggactagtaggagaatccggtagtgggaagtcaacgactggtcgaacggtcattcgactgaatcatcccacggcaggagaaatcttgtttgatggacaagatgtcatgaaaatcaaaggcaaaaaagatttagctgatttccgtcgagaagtacaaatggttttccaagatccgtatgcatcattgaatcctcgaatgaaagttcgcgatatcattgctgaagggatcgatatcaacggattggcaaaaaacgaaaaggaacgcaaccagcgcgtagatgatttgttgaaaactgttggtttaaacccaagtcatggaactcgctatccccacgaattttccggaggacagcggcaacggattgggattgcccgagcactagcggtagatcccaagttcatcatctgtgatgaaccgatttcggctctggatgtttcgattcaggcccaaatcgtcaatttgctgcaagatttacagcaagaacataagctgacttatctattcattgcccatgacctatcaatggtcaaacatatcagcgatcgcatcggtgtgatgcataatggtaaacttttggaagtaggttctagtgatgaaatctatcattatggggtccatccgtacacagagagtctcttgtcggcgattccactgccagacccagatcatgaacgagaacggaagcgcatcaaatacgtcagcgaaccaacagatgacaagcctcgtgccatggaagaaatcgcagaggggcattttatttatgctacgaaagaagaagcagcacagtatcagaaaaaattggcacaaaaaaaggggtagacctgtttaggaggagatgaaactgagtgttttaaaagcatacaaatttcggatctatcctacagaggaacaaaagcagttctttatccaaacgtttggttgcgtacgcttcacctataatcaattgctaaaagcaaagatggaagaacttactacaaatgcagaaaaagaaaaactaacacctgcaaaattaaaaaaagagtatccttttttaaaagagaccgacagtttggcactggccaacgcccagcgcaatttggaacgggcttttcgcaactattttcaaaagcgagcaggctttcctaaactgaagacgaaaaagaatatttggcaatcgtatacgacaaacaatcaacaacatacgatctacttggtcgatgatcagttgaaattgcctaaattgaaatcattcgttgcagtcaagcgtcatcggccaatcaatggtcagattaaatcggcgacgatttctgcaagaaacaatactgaattttatatttcgattctttgcatcgaagaaattcagcccttgccgaagaaccaacgaaagattgccttggtttatcatccagaagtgttggtagaggccaatgcacagttaccctttatcagtaccaatgccatcaaatctcaacaaaggctggcccgtgcagaacgaaaactaaatgtgaaagcaaaagctgtcaaacgaaaaaaaatggtgcttagtcatgctcgtaattatcaaaaacaaaaaggaaaagtttctcagctatatcgagcgcatcgtgatcaaaaaaaagaatacatcgatcaagtaacctttcatctggtcaaacaatacgatacgatttttttggaacggctgatcgatgagacttgtagatctacagggaatttttcagtcagcgactggcatcagtttattcgtaaaatcacgtacaaagcagagtggtacggcaaagaagtccgatttatttctttgtcggccaaagagtgtcaaaaaatgacgcaaatgttgcgtgtaatcgaaagtgaaacgaactgggaggagcgccagggatcgcctaggggatagaaaaaatctttggatttttgtttctaggaattctgctcactaattatgattaaccagcgaagaggctgtgacgtcaggcaaaacaaaaaatacccaaacgatacacaaacccacagacgctggctttatgctcagctgaaagtgattcgtctatcgtttcggttcttgtttgcttgtgttgcagcctctttgcacggcctacattttgtcgccaagcacatcagcattcaattcatagattttcgaaggtcgtccaataccgacgggcttttcaccgatttccgtgaaatattgaagcatggcttttttgaaatttgaatggtcaatcaatttaaaatcgatccccaaaaatttagcgaagactttacgtgcttcagtgatcgtgaagttttcgccgagaaccagcagtacttgtggttcgtgttccattttgtttgccactcgttcaaatgctttcaaaataatcgcgctatggtcaaaagccaatgtatccttaccgacagattgtcccgagactaggtccaagataatctcaacatcgccactagataaaaagatttggttcgcctttctctctaatgaaaaccagcggacttgattggcatcatccccagcgctcaaaggttcttcgccgataaaagcgagataactgaccgtaatgacccagccccgcgggtctcgccctggtgtgctgaaggtatggagttgttcgatgttttgctttgagatggttacgccgatctcttcttgcgtctcgcgaatgacactttgaccagttgactcattcggattgacgaaaccacccggtaaagcccaagaatttcgaaagggatgcccttttcgctgaatcagtgcaatcttcagttcttcttcttctttgttgtaacacatcaagaccatatcgactgtcacagaaggcttctcatattttggctggtcctgactgcgataccaagttaaaaattctgcttcagaagcttctttttcataatactctttttctgctgtttttgaggtgaattctttcattcctgtctcctactcctgatatgatgaaataataatgatgatggattagttaaaaaaatagggaaaaatcaaattgataaaaaagagtgctaaatagaagaatgccgctttttgtgtgtgcttcatggctaaatatccccacacagcgatccatagcaggaacccataacgaagcaatgatgtgatgaccacaaagaagctagctagattttgcccattgaaatagccgtaaaaatacaaataaaaactagaaaaaatcaaatggatgatcgttaaaacagctaagatcatgaagcgctgttgttgttttttcaagcgaaaaaccctctctttcaaacgttcattcctattatagcaaaaaaacagctcataaaccaaaaggagctgatagtaaaatcatctcatcaatttgggcaaaagaaaaaaggaaaaactcacagaaaattatggtatactaccttagtatacactttacaggtgaaaaggaggacgtacgcccatggctgaaaaagaaacattttatattacgacgccaatctattatccaagcggcaaattgcatatcggaaattcttatacaacgatagcttgcgacgcagtagcacgttataaacgtctaatgggctttgatgtgttttatttgactggtgttgatgaacacgggcaaaaaatcgaaaaaaaagcggaagaactaggtgttgatccacaagaatatgtagataaaatggctgccgatgtcaaaaaattgtggaaaacattggacatcagctacgataaatttatccggacaacggacgactatcacaaaaaggcagtccaaaaaatctttcaacaattattggaccaaggagatatttatcttggcgagtatgaaggctggtactctgtctctgatgaagaatacttcacagaaacgcaattggcagaagtttatcgtgatgaagaaggacatgtgatcggtgggaaagcaccaagcggccacgaagtagaattagtaaaagagtcttcgtacttcttccgcatgagcaagtatgcagatcgtctggtgcaatattatgatgagcacccagaatttatccaacctgaatcccgtaagaatgaaatgatcaataatttcatcaagccaggtttagaagatttagctgtctccagaacaactttcaagtgggggattccagtaacggcgagtcctgaacatgtggtctatgtttggatcgatgctttatcaaactatattacagcactaggctatggttccgatgacgattcattgttccaaaaatactggccggcagatgttcatatggttgggaaagaaatcgttcgtttccatacgatctattggccaatcatgctgatggcattagatttgccattgcctaaaaaaatcttcggtcatggttggctgatgatgaaagacggcaaaatgtcgaaatctaaaggcaatgtcgtttatccagagatgcttgttgagcgctatagcttggatgctttgcgctactacttgctgcgggcagtgccttttggcagtgacggcgtttttacaccagaagactttgtttctcgggtaaactatgatctagccaatgacctgggtaatctattaaaccgcactatcgctatgatcaataagtattgtgaaggaatcgttcctaaatatgcctcaaaagtaactccttacgatagtgagttgtcgacaaccgcagccaacgtcgtaggtcgctaccatgaagcaatggacaagatggaattcagtactgcattgtcggaagtatggacgttgatctctcgtgccaacaaatacatcgatgaaacacaaccgtgggtattggccaaagatcctgagaaaaaagcagaattagacagtgtgatggtccatcttgcagaaagcttgcgaatcgtagcaatcttgctgcaaccgatcatgaccgaaacaccggcaaatattttccatcagttaggcttaacttcagaagccatggacttgaaagacttgcggttcggtgaatttcctagtgataccaaagtagtggctaaaggaacgccaatcttccctcgtttggaattagagacggaagtcgcttacatccagaagaaaatggcggaaggaacgcaaagcactgctgaaacagtcaaatggaacccagaagaaacggttcttgcttctgaaaaaacagagatcaaatacgatgatttcgacaagatcgaattgaaagtagctgaagtgatcgactgtcaaaaagtcaaaggagcagataaactgcttcaatttcgcttagctgcgggtgatgatcaagatcgacaaatcttgtcaggaatcgctgagttttatccagagccgcaagatttgattggtaagaaagtcgtaatcgtagcgaatctgaaaccacgtaagatgcgggggcaaatcagtcaagggatgatcctttccgcggaagataccgaaggacgattaaaaattgttgaagctccaaagggaatgcctaacggatcaatcattgcctaagcgagacagtatttaatcatttctgttcttttttcagaaaatgaaattgcaactgaatgaaacattttgtataatggtctttattgagatgatcatgagggagtaactggcagcttatcgttgcggcaacatcaccatcctgaaagaaatttctggtgttgccttaaatagtgagactcgtgtatgtgttttagtgcatacatgagtctattttttttcatttcatgtacaataaagaaggaagaagaataaaggaggaaaaacatgtctgaagagaataaaaaagagcaactctcgcaagctttttatgcacaagaagctgaggctgttctgaaagagctgcaaaccgatgccaacggtttgacaaatgacgaagccaaaagtcgtctgtcacaatatggcgccaatgaattagaagaaggtaagaaaaaatcgatggctcaaaaattctttgaacaattcaaagatttgatgatcatcgtcttgttagccgctgcgatcatttctgctgtcgtgtcacatgaaatcgtcgattcaatcattattttagccgttgttattatcaatgcgatcatgggcgtggttcaagaagcgaaggccgaacaagccatcgaagcgttgcgggaaatgtcgacgcccaatgccaatgtgttacgaaatgggcatacggtgacgatcaaaagcgatgaactggttcccggagatatcgttcttttagaagccggcgatgtggtaccagctgatttacgcttattagaagctagttctctgaaaatcgaagaagcggcattaactggtgaatcggtacccgtagaaaaagaattgactgtgatcgatgcaacagatgttgggatcggtgatcgtgtcaatatggcttactccaacagtaatgtgacttatggacggggaaaaggggtcgttgtcaatacagggatggcgacagaagtcggtaagatcgctggtatgttagcaagagccgaagaaacggaaacgccgttgaaacgtaacttgaatgaacttggtaaattcttgacgatcgccatcatcgtgatcgccgtaattatgttctttgttggtacgatcttcaataatacttcttgggtcgacatgttgctgacatcaatctctcttgcggttgctgcgattccagaaggattgccagcgatcgtaacgatcatcttagcactaggcacgcaagtcatggccaaacgaaacgctgttattcgtaaattaccggcagtagaaacattgggtgcgacagacatcatcgcatcagataaaacaggtacattgacactaaaccaaatgacagttgaaaaactttatgtcaatgacaagcaacatgctgcttctgaagacattccattggatacaatggctctgaaagtcatgaacttcgcgaatgatactaagttcggtgaggaaggcaacttgattggtgatcctactgaaacagcacttgttcaattcgggatggatcaaggcttccacgtgaaagatcaagtgagtgcagaacctcgtgtagcggatctgccatttgattcggatcgtaaattgatgagtacgatccatgaacaagaagatggtcgttacttagttgcagtgaaaggcgcgccagatgtcttattgggacgtgcgtcaaaagtcttgttgaacggacaagaagtaccaatgactgaagaagaaaaacaaaaaatcttgttcaacaatacagatatggccaaacaagcgcttcgtgtcttgggaatggcatacaagtatgtagatgcagtaccagaaaacttggaatcagaaatcgtagaaaatgatctagtctttgctggtcttgtagggatgatcgaccctgaacgggctgaagcagccgatgctgtgcgagtagctaaagaagctggtattcgtccaatcatgatcacaggagaccaccgagacacagcagaagcaatcgctggacgtctaggaatcatcaagcctggtgatgacgcagctgtattgacgggtgctgaattgaacaaaatgagtgatgaagagtttgcacaaaaagtgactcattactcggtttatgcacgggtttcacctgaacataaagttcggatcgtgaaagcatggcaacatgaaggcaaagtcgtcgctatgacaggtgatggtgtcaatgatgcgccagcactgaaacaagctgatatcggtgttggtatgggaatcactgggactgaagtatctaagggtgcttcggatatggttctggctgatgacaacttcgcaacgatcgttgttgctgttgaagaaggacgcaaagttttctcaaacatccaaaaagcgatccaatatttgttagcggctaacttaggtgaagttttgacattgttcttagctaccttatggggctgggatacactgttgccgatccatctgttgtggatcaaccttgtaacagatactttccctgcaatcgcattgggaatggagccagctgaaaaagatttgatgaagcatgcccctcgtggccggaattcgaacttcttctctggtggagtcatgagcagtatcatctatcaagggatcttggaagctgcaacggtattgttcgtctattggtcagcaattcaatggccggtacacgatacctatgatgcaatccatgcggatgcattgacaatggcgtttgctacactaggattgatgcaactgttccatgcctttaacgttaagtctgtttaccaatcattattcaaagtgggacctttccgtaacaaaacctttaactgggcaatcttgctttcctttgcattgatgatggtcatcattgttgttcctggattaaatgacatcttccgagtggctcatttagatctctatcaatggggaatcgttctaggtgcatccttcgcgatcatcccgatcgttgagatcgttaaagctgtccaacgtgcaatgggcaaaaaataagcagtctctaaatttattccgcaggcagagtattctgactgcggtttttgttcacaccaatcgtcgtaaatgaataataggggcgaatgaacaatctgcttttgccgaccttttcatttttggcaataaacggtaaaataaaagatagctaagaagaaagtaggggaatgaatcgtgcgaccgaatttaggtttttatgtacaaacaatcaatgatctagtgaaagagacagagaaaatcggggaaaccatgaatccgaattatgaagagattcgtcaggctctcgataaaaaaaaggaatctgaactatcaccagagcgtctggaaacaatcgaagcgtcctttaaaaaaggaacggacaaatatcgtttgatgctggaacagatctctaaattacgcccgcctgcaacggtcatggggattcacaaaaaatttgaacgagcatatacgaagtatgttgctggctgtgaagaaatgattctaagtattgctgatggggtcgatcgggaagctttcgatgcgtcagagaaaaaacaagacgaagccactgatgaaatctcttttgcaattcagcggatgacagctctcttgttaaaaaaatgataaagttcgtttcttaaacgagagttatttaatttaaatgttatgttattcttatgtaaaatgatgatggtggatgtataatgaattaacaaccaacaacctttttatttttcattttactccttttgccatcaggactaaccaacttgatggtttttttgtttttataaatgtttttttactcaaaataataaaatgactgcaaaagacattgtgaataaatttacctaacagtttgttagtatcgtttcactgctaatctaaaaacaagtatcgccaattgcggtttttcgcggtagatgctatactgaaaacaacttataaacgaaatgagggatcctccattgaaaaactaaccaatttgttggaagctgcatagaatcatgttctctagggagcagtgtgcagattttcaggattggtgtgtttttctggagggtctttttgtgtacttttctggaacctgacctgaaaataggcgcggtttttgtctagagatagacaggaggtacaaaaatgtcaaatataaaaatagaacaattaagttttggcttcgatactcagaatcatctgctgttcgatcaagctgatttggtgatcgatacccagtggaaattaggtttgatcggtcgaaatggtcgggggaaaactactttactcaaattactgcaagaccaattgccttatagcgggactatcacccatcagcaagcattcgtttactttcctcaaccagtggcagatccgcaacaactaacctatgatacattacaagatctgtgtgaatttgagcaatggcagatcgagcgagagttaaatttgcttcagttggatccagatgtcctctggcgtccatttgagacattgtctggtggggaacaaaccaaagttttacttgcactactgttcatcgatgaggaacactttccgttgatcgatgaacccaccaatcatttagacattacagctcgtgctcatgtagctgcttatctaaaacggaaaaaaggctttatcgtcgtcagccatgatcgacactttgttgacgaagtggtggatcacattttatcgattgaaaaaagccgactagtgatttatcaggggaacttttctgtttacgaagaacaaaagcaacggcaagatcagtttgaacaggagcaaaatgttaaactgaaaaaagagatcagccgtttaaagcaaacggctgccgaaaaagcagaatggtcacgaggacgggaacgagataaactgggatcaccaacaaaaaaaggcagtggagcagtctatgacacaggggcgattggtgctcgggcagccagaacgatgaaacgatccaaagcaatcgtcaagcggatggaagatcaagcacaagtcaaagaacagttgttgaaagacatcgaatatatcgatcccctttctatgaatgttaaagccacgcatcacaaagttttgctgcgagtggaaaatttgcaattgacgtatgagcaaccgttgtttgatccgttgaattttaccatcgaagctggtgaccggattggtattttgggtgcaaatggttctggcaaatcgagtttggtggctggcctattaggtcattttactggaactgtcaccggctctgtttggatgccgcaacatttgtccatcagtcgtgttcgccaaaattacgaggataatcgaggcaccttgactgagtttgctgaattccaccgattggattatcaagaattgttgaataatctgaagaaattgggcgtggagcgaaatgtctttcagacccgaatcgaagatatgagtatggggcagcgtaagcgtgtggaattggcaaaatcgttggcaacccctgctgagctgtttatctgggatgaacccttgaattatctggatgtctttaatcagaatcagttagctgaagtgatccaacttgtccaaccgacgatgttgatcattgaacatgatcgccattttctggatcaagtgactacacaacaatttttgcttggacatacagatctagcgcgtccataaatcgaaccgggataggatttttttaaatcttatcccgattttgttattttaaagtggtaggtttttgagaaagataccctattttgatcgttagtctgtttttttgatttgagtggtctagataaaaaataataaatggggtgcctgttttttctttttttatttattttagctggattttttatttattttgcaagaaaaaaagccttactgtgcaatattctgtcgttcaacaatctcatttttttctcatcgttctgctagttaattaaaatttctatcataattaccaaagggttttacaaaagatttacaataacagtaccgaataaaaatattcatttgttatcataaaaatcgaatttctttgagcgtttgacaacagcctgtaagaattcagctgtttttgtgttcctatcttgctggtcgaacaaaagcggcaaagagaaaaataatggaggttctttttttgatagaagtagttgggttgaagaaggtctttgacaacaagtttgaagctttgaaagcggtggattttacgatcgagaagggcgatcttgtttgtttacttgggcctagtggctgtgggaagtcaacgattttgaatttgatcgctggattgttgagtccgacagatggggatatccgctttaacggaaattccgtggtgaaaacggagccaaaggatcgcaatatcggctttgtctttcaaaattatgccttgtatcctcatatgaccgttttagaaaatgtcatgtttccactgactgttggtgataaaaaaatcaagaaaaacgaagcgcagcaaattgctgaaaaatatatgcagctgaccaatattgaagaattgaaggataaaaaacctggtacattgtctggtgggcagcaacagcgggttgccatcactcgtgcgttagtccaaaatcctgaagtactattgctggatgaaccattgagtaatttagatgcgcgtttgcgtttaaagattcgcgaggagattcgtcgcttagtcaaagaagttgggatcacgacgatttttgtgactcatgaccaagaagaagcgttgtctatcagtgacaaaatcattttgatgaatgaaggcgtgatccagcaaaatgatgatccgcaaaatctttatttagaacccaataatttattcgttgcaaagtttatcggaaacccaattatcaatatcttgccagtagaagtgacagatggtgtcatgcatcatccagaattcacgatccctacagagcgcttcgtggatatccgcttcaagaaaccgttgacagatggtcattatactttagggatccgtccagaagatgtgttaacgacgacccaaacaccattattcaataccgagataaaaagtgttgaactaattggtcgtgaacggatcttgaactttgatctggctgacatccacgttaaatcgatcgttagcatcgaagaaatcattgaagaaggagcacacttagcttttgacttcaattacaaaaaagcgttcatctttgatgaaaaaggggagcgagtttattgatgttcaagaaaaattataatcccgaaaatcaacccaaagcttggctgttcttattgccctcactagtcattattttgctctttagtgtgtatccattatttcgttcattgtttatgagttttcaaaaaggatcattgatcaatcagcgatatgccggattagaaaactaccaaaaagtgctgacggatccagtgtttttcaaggcgctaaagaatacagcttggtttgcattcgccgtggttcctattgcattagtgatttcactagcgatcgcttggatcatctttgaaaaggtgaaacataagagcttttttgagacgatcttctttatgccgtatgtcaccagtaccatcgccattgggatcgtgtttcgctatttctttaatgggtcttatgggatcatcaactacttgctgggcttagtggggattcccgccgtcaattggctggataatgtcaatatgagtatgccgacactgatcatttttgggatttggagcagtttggccttcaatattattattctcttagcagggatgcgtaacattgacaaagaacattataagatcgcaaaaatgtttggcgccaataactgggagatttttcgcaagattacttttccgcagttgattccgacatttgccttcttgttgaccgttaatatcatcagtgcctttaaagtctatacacaagtctatgccttgtttggtggtcaacccggtatcgccaaaagcgcaaccacagctgtctattatatttatgacaaattccatattgcgggccgtcctgggatcgcaatggctgcgactgtgattctctttgttattattttggcggtgacctttatccaaaataaaattttaaagaaagtaggggaataagatgaaaaaagtcgtaaccctcatctctctgatttttttggcgctcttagcgatcatcacgatttttccgtttatttatatgattctcgcgggactgatgacttatagtgaggccaccagtattccgcctacgattttgccggagtcctttcaatggagcaactatgccgaagtctttaccaaagcaccatttctccgttactttctgaatacagtctttgtttcagcagtcacgactatcgccacattgattactgctattctggcagcttttgcattgactagtttggaattcaaattcaaagggcttgtgattgctctaatgatttccttattgatggttccttatgaatcaatcatctttaccaactacaacacgattgctcaaatggggttgttgaatacttacagtgcgttgattattccctttctgacgagtatcttttatatttattacctgaatggctatttgaaaagcatttcgaataccttttataaagcagcaaaaatcgatggtgcaagcgatatggcttacatacggcggatattgatcccaatgtctaaaccggcactagtgactgttggcatcttgacctttatctcgagctggaattctttcttgtggccattgttagtcacgaatgaaaaaaaatatcggttgttgaacaatgggctagcggccttcacatcagaaagcggtagcgatgttcatttgcagatggcagctgcgacattgactgtcattccgattttgatcatttatttgatttttagaaaagagattattaaaggagtggcaaaagatggcatcaaaggctaaaacaacagttacatttcacagtggtattctcacgatcggcggcaccgtcatcgaagtgacatacaaagatgcccatattttcttcgattttggttcggagtatcacccagagcagccattacccgacgaagcattacagaccttagtggatcatcgctgggtcccgcaattgcgcaatgtctatgatcctcgtctgtcttatacgtatcatggatcagaacaaaaggactatcaagaaacagctgtttttctatctcatgcccatcttgatcattcaaagatggtcaattatttggaccctgcaatccctttgtataccttgaaagaaaccaaagcgatcctaaaagcattgaatcgcaccggtgattttttgattcctactcctcatgaagcccctgcctttgtgcgggaaatgattggcttggaaccccacgatgtgatcaaagttggtgagatcgaagtagagatcgttcctgtggaccacgacgcctatggtgccgcggcattgctgattcgaacaccggatcactttattgcctatacgggcgatttgcggttgcatggctatcatccagagcggacaaaagaattttgtcagttagccaaacacacggatctattgatgatggaaggagtcagtatcagttttcctgaaagagaaagcgatccagatactatcgaagtagccagtgagaaagaattggtagcggcttttgtcgagttggtcgaaaaaaatccacaacggcaaatcactttcaacggctatcctgccaatgtagagcgttttttagctttggtggatgcttgtcctcgaacgatcgtccttgaagcacaccaagcagcattactgaaagaaatctttgacagagaagttccctattacacggttgaaggcggagcttccttagcagagttagatcctgcgctagaaattgattatcgttctttatgtgtcgacactggccagtatgtctggcaagcagttgaccattttgaaaatttacaaccaggcagtctgtatatccatagcgatgcacaacctttgggggcttttgatcctgcctatgaagagtttctcgctttgttagcaaagctggaaattgagtttgtacggctgccggtttcgggacacgcagttcctgaggatcttgatcagattattgcgtggatcgaaccaaaaagattggttccaatccataccttgaaaccagagaaactggtgaatccgtatggcgaaagaatattgccagaacgtggcgagaaaatagaactataaaaggatagaggagagtaaagaatgaaatcaaaaaaactagcatttgcagcagtggctgcggcaactttagtgttaggggcatgcggcaacaatggctcaaatgacagtgcaaaaggcagcgatgagatcgttacagaggttccgaaagatactactgtcacattctggcatgcaatgaatggtgcacaagaagaagcactgacgaaactgacagatgagtttatggaagcaaacccaaatgtgaaagtagaactgcaaaatcaatctcagtactccgatctgcaggcgaaaatcaattcgacactaccttcaccaaaagatttgccaaccatcacacaagcgtatccaggttggctttggaatgcagctcaagatgaaatgcttgttgatttaggcgagtatatcgataatgatacgattggttggggtgaccaagaagaaattcgctcttcattattagaaggtgcacaaattgatggtgtccaatatggtattcctttcaacaaatcaacggaaatgttattctacaatgcagatcttttaaaagaatatggtgtagaagtaccgacaacattagatgagttaaaagaagcttcaaaaacaatttacgaaaaatcaaatggcagcgttgttggtgctggctttgattcattgaataactactatgctattggcatgaaaaacaaaggtgttgattttaacaaggatttacagctagacagcgatgaatcgaaaaaagtcatcaattattatgcggaaggtgtgaaagacggctacttccgtattgctggatccgatcaatatctttcaggaccattcgcaaacgaacaagttgcgatgttcatcggctcgattgctggagaaggatatgtcaaaaaagacaccgaaggcaaatttgaatatggtgtctctgcccgcccagaaaaaatcaatctacaacaaggaacagacttatatatgttcacaagtgcatctccagaggaacgtaccgctgcttttgaatacatgaagtttttgacttctcctgagtcacaattagaatgggcagtttcaacaggatacatgccagttgttcaatctgttttagatagtgatgaatacaagaacaatccagatacgaaagttgcttctgagttaagtgaagcaacaaaagaacttttctcgatcccagtaattgaaaatgcagactcagcttacaatgaagttcgttccatcatggagaatattttgtcgaatactgacaaagataccgataaattgattaaagattccattccacaacttgaggatgtttggaatcaatagttctgctcgtaaaagggccagacaatgaccctatcaacccgaaagagaccgtcagatatccctgcggtctcttttacataaatgttagaggagtaatgagaaaatgcaaatcacctttcttgaaaccagcgacatgcacggctatgtctacccaactaatttcgccgacgaccacgatctggctattggggcagcgaaagtcgcaacgaaactaaagcagttaaaagccgaagctgatggtcctgttgtaatgatcgaaaatggcgattttatccaaggatccccactgagttattatattgccaaaagccagcatccggtagcagaattgaccaaagtgatcaatcacatggcatacgatgtccatgttttaggaaaccatgaatttaattatggattaacgtatcttcaagaggcaatcgctagttatcagtcccctgttttagcagcgaacatcttaaatgaagagggacagccctatttcggcaaagcctatacgatccttgaaaaagatgggattaagattgcggtgttgggattggtgacccagtatattcctcattgggaacaaccagctaccatcaaggggatgcggttcgaaagcattatccaaacggcaaaaaaatatgtgcctgagctaagaaaacaagcagatcttgtcatcgtcagctatcatggcggttttgagaaagatttggtaaccggtgaagccaccgaattgttgaccggagagaatgaaggctatgagttactgcaagaggtgccggggattgacgctttctttactggacaccaacatcgggaaatcgccgccattgtcaatggggtccctgtggtccagccaggttatcggggcagccaaatcggccgaatccaattaacaatagagaaaaaagagggtcaaacagtgattacggatcaacaagcgacattgcattcagtggcagaagtttcagccgatgaagcaattttggcaatgatcgaaccaattgagacggaattggaaagctggttggatcagccgctagggaaagtgaacggggatatgcgaattactgatccgatgcaggcacggatcgtggaacatccatacgtggaatttatcaatcgcgttcagatggctgccagcggagcggaaatatctgggacagcgctcttcaataatgaaggaaaaggcttcggtacaacgatcacgatgcgggatgtcatcacgaattatatttatcctaatacattggctgtcgtaaaagtgaccggagcagagttgcgtcttgcgttggaacagacagcgaattacttagccgtcgaagcagggaaaatcgtctttaatccagcctttatcgagccgaaaccgcaatactacaattatgatatgtacgaaggaatcgactatacgattgatatgaaccagccagttggcaaacgaatcacacgcttgttgttccataatgagcctatcacgccggaacaggagctggaagttgtcgtaaatcaataccgagcggtaggcggtgggaattacgcgatgtttacagccgacaaaattgtacgggagatccaagtggatatgactgaattgattgctgattatttgaaacaacacccagtactagaagctgagacgaatcagaatttcaaaatcgtgtactaaaaagccaaaaagggctgtgacataagtcatgcaacaaacgaacgattccgaggagaatgagactgtgcttgcgcttcagcaagtttccatcaccaatgtacgatggatgacacccagttatcctcggatcgtcttgtctagttgctacttatgacacagaccctttctatgttcttgtaaaagaaaatcagattagttttctacattgcggacatattcatcgaagtagcgaatcaaatcggcttttacctgctgatagtcttcttcgctatagtttttttcctctaattttgcttggaaaaaaggaagttctaactcttcttttaagcgctcaagcacttcttcttggttcatgagatcaccttttcgtctatttggtaccatcataacaaattgaatgcggctgtcaatgcttcatacatttctttcattttttccaaacgacttttaagagaaacaaagtcatcgtcatcatggaaaaggacttgtttcaattcaaaatagtaaatctcaaaagcatcaaagaagccagtaacttcggatgtttgcaattctttaaaggtatcacaacgaatataggctttttctgcaatggcataggtttcagccgtagtcaataagacgagggcttcattgtaacgacggctagtgaccaattcataagttgactggcacttattataaatatttgaaaaatctttcagtaaaagctcgatgggtgttttatcaaacatgggggagtcctcctgatcgttttatttttcaaataagacacaaacacattcaggcgcgtaaacgtctttttgaatagtagtgagttcaccagtttcggcgttgcgacggtacaaagtcaagttgtcggaattttgattggcacaaactaagaatttgttggttgggtccaagtcaaagtctcgcgggaagtcaccttctgttgatcgacgttgaatgaaattcaagccagcgccatcttcagttacttcaaagacaacgagagagttgtgtccacgattggatgaataaacgaaacgtccatcttttgatactcggacagcagccccactattaaagtcggtgaaatcttctggtaaagtcggtactttttggatttcttcaaagctgccatcagcttcattgtagcgtaaaacagtcaaagagctgtctagttctcctaccagataagcatattggtggttaggatggaacactaaatgacgagggcctgttccggcagctgcaacataaacagccgcttctgttaattttccttcagcagaaacgtcatacgtatacacacggtctgttccaagatcacatacagctaagcgttgatccggcgttaagtctgtgtagtgtacatgagggttgtcttgattttcgtgaggaccaacaggttcatcatgatagatgtgatcagtggcttcaatactgccgtccgccaatattttgtagacgtttacttcacctttatgataattagcaccataaacaagttgacgaggttcatctactgctacataacacaatggtgcgccttcttcggtcacagtattcaacaactcaaatgcaggcgtataagcaccacaaccgcctgcgccatcaacttcggtcacagtatatactctttcttttttactgcgggcaagatacgttgggctcttttcttccgcacgcaaggtcaagtcgaccaattgttctttttctgtatctaaagtgatcgaatagatccctttactttcgcgacgcgtataagtgcctaggtagatcgtttgcaacataaaaaaagcctcctaatagtttgatttcttattaattctaccatagaatgcggaaatgggcggatagaaaaacttcttatgttataataaaaaaagaacataaaggggaggttgttgtatgaaacaaggaacaatcaaagcgattgggccacaagcgatcgatcaaaaagaaaaaatgctgatttttttcggcgaccaagcaacagagatcttaagggagtattcagtgatccaatcgattccagattctcaagatttggtcgtagaaaacggcgatacacttatttttggggatcagtcgtacaccgtgacacatgtcggtcctatcgcaaatcaaattttgcaaacgatccagcatgtgacatttatcttcgatgaagtacccgaagagcaactgaccagcgctatctatttagaacctttcaatttgccgacccttgaagttggtatgaaagttatctacaagtaggaggcggggaaatgaaggaaacagagaagcgccctttgtcctggttttggaagtggtttttaaataatcaagcagtcacgagtctattagtggttctactcgtcttattgatcttgtttatgtttacgaaagtatcctatctatttgagccaatttggcaatttctggcgattgttggattgccaatcattttggcggggattttgtattacttgatgaatcctgcggttgattatctggaacgaaagggaatcaaacgcatctatagtattttcggtctttttattttggtcatcggattgatcgtctggggcgttgtggtgattgtgccgaagatccaagaacagtccatgagtttcgttgagaatttgcccggatatttggatatcattgaaaataaagtcaatgagattttgtccgatccgattttctcacaagttcaagatcaattggaagcatctaatgagaagttgattgcatcaatgaccgacatcattcaaaacttatcacggagcacgattcaaaatatcggcagcttttttggggccgttgcaacggtggtattggctgtcataacgatgccctttattctcttttatcttttaaaagatggacgacagttagcaccttatttcgtgaaatttttgccgacaaaaatgcgtaaaccatcattgacggttttaaaagagatgaatgatcaagtttcttcttatattcgcgggcaactaacagtcgcatttgcagtagccatcatgtttatggtcggttttagtttgatcggcctagattatgccatcacattagggatcgcagctggctttttgaacttgattccatacctaggctcttttctagcgatggttccggcggtctttttgggtatcgtcggtggtcctgtcctgttggtgaaagtcctggtcgtctttgtgatcgaacagactattgaagggcgattgatctcaccactcgttttaggaaacgagttgtcgatccatcccgtgacgattttattagtattgctgacttcgggtaaactcttcggacttgtcggcgtgattctggggatcccggtatatgctgcggcaaaagtgatcattacccatatttttgaatggtatacgaccgtatcgagtttgtatgaagaagaaacggaaagcgatgttcagcaagaatagttcgaagaaaattttttgacgaaagatctttgtgaaaatcacactgactcacacatttttctagttttttatcggagtataaaaaagctgaatttagaaggctggagcgaattgcttcagcctttttgttatgtgcgatttttgacacatagttgcaagaaaaacatatagcttctgtttctagagaatgcttatactgaaagcacatacaagcaaaggagcgttggaatgaagattcttgcagtagatatcggagggacaatgatcaagacggggttgttgaatagtcacggagaaagaatacaattaggaagctttccgatgaataaagactattcaactgtgatcgaccgattgatttcacatattgataatgactatccaaaagacttttccggaattgctattagtacgacaggattagtagatccagtgacacaacagattgggatggattcaccgctttatgagggatttggtaatcgcatggtttcttttttaacggactattatcaaaaacccgtcatcgcggagaatgatggcaattgcgcgcttttagcagaaaaatggctgggaagaggaagaggcgctagcagttttgctgtcattgttttaggtacctctgtgggaggcggattgatggtcgataaccagttgattcgtggcaaacactttttagctggcgagtttggttatatgctgtttcctgaagtcgaaaagaaagattgggaaatttggagtattgccggtgcaacaagaacattggtagaacaagttgcagccgaaaaaaaagccccctcgattgatgggtataaagttgttgcttactaccagcaaaacgatccggcagtgacgatttgggtggatcgctttattgaaaagctagccgtggcctgctacaacctacaatacattcttgatccagaaattgttttgattggaggcggaatcagtgaaagcgactttttactgccgctattagaaaagaagattcagcagattgcagcgcagattcctagtacagttcgattgccaaatgttgcctgttgccagtttgggaatgagtccaatttaattggtgcttgctacaattggttactgcaaacttttgaaatgaaaactagctaaaacagttgcaattctaagataaaaatgtaataaaaaaatagtctctatttttttattatgtaagcgtttaaattgcagcgaatgaaacaagggtcaggtgataaaagtgaaaaagttttacgatcaaaacgggcaaaacacgttcagagggatcgcgcgctcaatcagttcctacttgctggtattcctgatcccctttttaacggtctcgtggatttggtatgcgacttctgtcaaaagtatcaatgaacaggttgcattaacggcaaagaatcagttgattcaattgaaatactccttagagaacaacttccttcaattgaactacctgacccagaaaatgacggatgaccatcaactctcattaaattttttgacccatccctattattcaaaggaaggcaaagcaagcctgcaaacctacaagatcacgaatgagtttgtcgaagaagtttatttatactataaagaagaaccggagaactttttttcttcgattggcaaattatccgtcgaaggtttcttagaaaaagtaatcccagataatgatatgcagcaaggacagctgatcgatcagctagagaaagcttatccaacgttgctgactatcgaaggggcatcattggcacggcatcattcccgattcttctacattgtgccgttacaaaatgatgaactgactgtctatggagcagctatttatgagatcaaagaagctagcttagcaaaaatgctggacttgaccaatagtgatggtgcgagtacgaattatttgatcaatgatgagtttcagattttagctagcacaaatcataacgatttgacagtttttttgaatgatccccaagaaatggctcagatcaccactcaggacacctttcagtttaatcagcaaaagtacctcgttcaatcaattcccaatgaggaactgcatatctcagtggtatcggtgaccaatccatcacaagcattatcgctggtcaatcgcgttcaagaacatttcattcttatttttatgtgtattctattcgtggggatcattgctgttacattaatggggatcagaaattatcgaccgatccgcaaaatcgaacatttggttcgagaattccataaagatatggagatgtcggtcaattcgatggatgatgttcataatacattggctgctgttttagaagaacagcaggaactgcataaagaaatccagatgcagacgccgcatgctcgagaacaagttcttagaaagctgatgagcggtcgtctgcgttcggaacaagaagttgcaaggctgatcgaagccgttcatattcattttcctgcggacaattattttgtcatcacgatcgataccaaaaccgtggcttcaaaatataaagccggcgagagctgttttctgattgactatattgaagaaatcagcagccaagggtacacagcctacgccaccgagatcctttccactgaagtgatcgcattgactgtgggatttgatcacagataccaacaggaagagatcgttcaagaagtcgcggcaaaaatagcagctgcgattggactgcttccagcaattggggtgggaaccatcgtcaatgaattgacggctatcaatgaatcttatattgaaggattagctgcattggattatcatgtcagtaacaaccagcaaatcatttattaccttgaaatttccgcagaagaacaacgctcggcgatccagtatcccgacagtcaaaaattaaaactgatccaagcattgaatcaaggaaatagcgatatcgcaattgaaacggtgcattggttaatcaaagacgggttaagtaaacaacgatctcagccggtccaaaagatgtatggctattatttattgaatacggttgcacaaactggaggcgaattagtgggagaggagattttgctatttgcagccgaacatgcagattttactaatctgatgcagctaggaacggtgttgcaacaattggtccagcatatttgcgaaaaagtgagggatcgaccacaaaatcaagaatcggagttgaatgaaacgatttttgcttatatcaaagcaaattttcagtcttctcagctgtcattggaatctattgcggaagaatttaaagtatctgtctcttatattagtcgatttgtgaaaaaagaaagtggcaaaacattttctaagtatatccaagaactgcggttagaaaaaatcaaacaagaattagtcgaaaccgatctaccgatcaaagaaatcattcgggacaacggttattatgatgtctcgaactatacgcgtaagtttcgaacgatcgttggtgtaacaccaggacaatatcgcaaaatcaaccaaaaacgctgaaaatgcgaaaaatgaagggaaatgtgacaatgaaagaaatgactcaaaaagcgagagaactttatacttctattggtgtctcattagaagaggaaccaaaaattaagatcgaacctgcactaacggcagattttattcttgatgaggaacaaaaaacgatcactgcgaaagatccccagcaattattttatggtctgacaacctactatttgaatcaagtgacgaagaaacaacaaaaaaacagctacaccgcccaaatcaaggagcgctgcctaatgatcgatattggccgcaaatatttttccttaaaagaactaaaagcactcgttcacagtatggctttttttcagtttacccatttgcaagtccatttttcagaaaatgaaggatttcgaatcgagtctgaatgttttccggagattgtatcaaccgaatatttaacaaaaacagagatccgagaactaatcacatatgccaaaggttacggtatcgagatcattcctgattttgactcccctggacatctcaagcaagtcttagccacccatcccgaatggtgtttacctaacgcgactggtggggtcgatgctagggcattgaacattcttgaccaagaagctgttgctttcatccgagagatctacaaagaatacgcagagctatttgtagacagccattatttccatattggtgcagatgaatttgttgattttgaccgtctagaagagtttccgactttagttgaagctgccaaagaagcatatggaccagaagcaagtgggattgaagtattcattgcgtatgtgaatgatttggtggactatgtgactgacttaggttttgttgttcgtgtatggaatgatgggttttatcgcttgaatcgaaaggaacagctttccttaacgaaaaactgtgagatttcctattggacacgctggaatcaaaatatggcaccagtcgctctttattttgacaaaggctattctgtgatcaatcacaatgacaatttcttttattatgtagtaggtgaagctgcagggtatacgtatccgacctatgaaaaaataagcgatgagtttacattaacgacttttgccaacggacagcaagtgacccaagaacaactagcacaaaccccagcgatcgcattagcgatttgggcagatatcccagatgcaaaagaaggtgcggcagtgatcacagaagctttttggctgcaagctatcattagcctaaaagtttatgaagaaacagatccagggaaagaaacctttagccaactatttcagaaatggcagtcgttgttgactaaagagcagtaaagcgaaacgttctctaggaaaacgtgacttgttttaaagtggacgataagaagagattcctaagaagaatacatggagagaatacctaaagcgagtatttaaagcaagtacttaaatagtagacggcagtctagtgaatcttcgtcgtgggtttgcgaggaagatttactgtctgccgtctatttgctagagatattgtctagcgctttacggtattctttgttctactcttttcacttcaatgtaatctcaaggactggaatgagaacattaggtggcactaccggcagcgtgacgactagatcattaggagcaatgacagcttccgtagaagtgatgacttcattaggatcaaagccacgataaaaaatttcagagccatcatgcaagaagcggataaagcgaacttgatcagcaatttccggcaaatgaatatgtttgaagggatagctatatacatgcaaatagagtttcttgccattttgagtataacgacaatctttaggtaccgggtatttactaggaccacaatcgatgatagcttctttatgcagccgtatccatgcaccaatcgcctgcattcgtttgactgcccgcgggtcgatctctcctcggggattaggaccaatgttcaataaaaaattacccccttttgaaaccgtatcgatcaacattttcaccaacatatcacttgatttccattccaacgcatcgcgatcatagccccaagtcccgtacattgtctgacaggcttcccaaagaacaggtaaaccgtctttttccagtggtttttctggttgaaattgttcaggggtggtaattccccgaccaagttccaagcgatcattgatcagcatatccggttggagtgtccgacagattttttccagtcgcgaactgtcccagtcttctgctccttttcctttagaccagccccaatcacgatgactgtaaggaaagtcgaaccacatataatcgatcctgccatactgagtcaatagttcggtcacttgaccagcaatgaaatcttgataaataagcatatcccgttgagaattggactctcgagcggctaagtcacttctttgaggatgcaatccatcaatcgtaaaatgagggtggtaccagtcaatcagcgaatgatagagtccgattttgattcccacatcacgaaacgcaggcaataattctgcgagtaaatctcgcttaaagggtgtattggtgactttataatcggtccattcactatcccatagggcgaacccttcatgatgtttcgtagtaaagactatatattgaacaccgcaatctttagctgtttgggcccaaacagcagcatcaaataaattgggattaaattggtcgaaataagtttctcgataagtttcgggggcaatttcttcggtggtcataaaccattcgtggcgtgcaccaatactaaataagccaaaatgaatgaacaacccaaaccgatcatgaataaaccagctaggatcggggtaatgatcaggccaattctgaaatgttttcatagagatactccttaatcaatgaattcggtgtttgtcataaccgtttctttaatcttccactgcccattctcgagcacaaaggtatgatgggcttgggtaatatggtcgcgatagtcattctgtccttggttcactgttttttgctgtgcagctaccagcatggagtctgcttcttgtttgacaacttcaaaagacaagagttcatgagtcaaatcatatttcgcaaaaaaagcgtgcatttcctttgccgtagattctcttgcagaagtaacaagggtcgctgtgtagccctcaacgtctttctgggtggctgcctgcaggttttgctttagtacggtcagacacgcttgtgctgcagaagaatctgtaacggctcctgtaacttgcaaacgagctacagtggtttctgctgaacgagaagttgtctgttgataaaaaaatagaccgcaaatgaaaagtaaaccaacgaaaaataagggataactcttttttttcatgcaaatcctccttgttttctgcactattttttgtcctttttttgtacttatacatcagatatcttgctggcactataaatgccatggaaaagatttcttcccaaactgccgacacttgagggatcatctactggcaacagtggcatctctagttctggtaatctagtgatgtgaccatccaaatagttctgcaaacgccattgtgccatctcggcacgtttagatagagcgccgtagcgaagatcgatcacttcaaacccaaaggggcggttccattcaaaccacagatctcgatgagattgatgcaagtgttgtaattcctgctgatagtgctgaatcatctcaagggctttttgaaggttctcacgttttttttcatgataggcttctgagatccagggactcaaagaagctttcaaagctagtaccaccgctaattggtgataaaagcggaacatccgttgtgtgtcctgtgtccccgtgactgcggccaatcgttgggccagttcctcataatgttgggtcaatggcacctctctgaatgtcttttcataaaggccataaagaatatcttgataaagcaataatttacttggatttgatccagaaggattttcggcagcaacaccgggagtttggtcaaaaagatccagcaaaagaaaatcttctgcttgtgatccatgaaatagtttcaagtgatctgtgactatctcccgcgatggcgtggcataaaactgggcctcgctaaataattgtagacctaacaagctggcaatcatcggggtctctgcgccgtcatctccccataaggtagcatagacttcagtgatgccatttgctttggcacttcttaatgcttgctccattgtagcgatggttttgccataattgggtgccagtccattccatgtccaaataccgccagcaaatactgtgggttggtttagctttttatgttcagcaaacagtcgttgatatgtttgaaaatcatgatgataataatcccagtacaccatgttgactgctggaatttgctgaatgacttctggaggaatgacgactgctggatcatagtaatcgcctgttggagaaccaatccgaaagaacatgtcactccacatcatgggttctaattgtagctgttcacagagagtgatgacgtgttttaaatgtttaatcatgatggcaaagcgatcttctaaaccattgtgttcgaggtaacggccttttcctaattggtgtgcttcatccataccaatatggattttatttgttttgaagcagctgcgaatggaacgaagagcggcttcaagaaaaatgtaagttttgggctcaccaactagcagaatgtcttccgtgtcacgtatctctttggcaaaatgccactttaatggatttgtcaaatgagcgagtgtttggatcgcaggaactaatgtaacgcctaattggtcagcgtaatggtccaattcccgcaagtcagattgactgtatctccctcgcaaatgaccaaaataaggatattcaggaatttcgtaagtatcttccatatatagcatgagactgttgagccccattttgctgctcaacaaaatgaaacgtttcaactgaggtactgtcagtactgcatttcgagataaatcgatcataggaccgatttggtcaaattgcggagtctcttcgtggacaaaatcggtatctgcttgcatccatagaaggagccctcgaaataaatgggctttttcctgatagtaaatcgtggctttttctgtattggaaatgattttcaatgatccttttcggcggatcaattcaagcggtttgccggtttctgatagtgacaagccaagttcaggagcaacgatttgaaaaaaagcggcgacgttttcgttggtgacaatctttatctccatgattcacttctcctttagtaaaaaatcgtcagtgttcatttgttagcaactctgttttttggatcgcttgataggcgaaccaactgattggccagagaagcaaagggatgaaggcaatgaataacaaaatcggcaaaaaggtagcggcgaatgtaaccaaaaacacacctaagatcatggcaatcgtttgtggcacactaacgatcattaaaagaaacgcattcctgaaatagacccaaaaaggaagatggtagcggacaaagaccggcagcaaataaaagctgatgagcaaaccgctgataaagagtaccgtcaatccgaaatggagaaaggcattttgcaagaatgtactggagatccgcagctcgatccatagcagcagcaagatcgccatttgcagcaaacctagttgattactacgccaaaaatttttggctgtctgttgtttgaaccaactataaagttcagcaggcagtggtttttttgcaaataattcaaagaaatagcgaataacagtagccgtcgctggaaagaagccaaaaatgattcccccccgtaagacaaaaaagaaccacaaaaaatgcaatcgaatcaccatcagcaaatagtcacccaaccggtaagatagatcaaataaccctcgtgattgtttcatggacacccctcttttaactaattgataaaaagtagaaaactactagccaaatagtagcaagaaatggaccttttagaaagcgtattcaaaaaattacatagccgaaccagctaatacatacaccttcctaaagctatcttttgaaaacattcgattgcgacgaggagcgctagcccgcaggagcaagttttctagataaagagaaaagtacgacgaggagcgctagcccgcaggagcaagttttctagataaagagaaaagtacgacgaggagcgctagcccgcaggagcaagtcttctagataaagagaaaagtacaacgaggagcgctagcccgcagttttcttacaaatgagaaaggtgaaattgctagagtgaacatggcgtctgataccgtaagctaaaacttcaattgaagtggtgtgttttttaaaaagagtgctcttttgttacaaaaaaataaagtttgacatagctgctgaaactacatattgatagcgctttattttctcgttagattagtggcgaaaggggttggataaattgacaacaattcgtggggacattgagtctgcgaaaaacagtaagcaggatgatcgttggtaccctgagtcagagatgctggccaagcgtttggaatggttccaagatttaaaatttggggtaattttccattatggcttatacgcacaagcgggtatcgttgaatcatggcaactatcagaaaaagatgaatgggcaagggaaaataaagcttatcgagaagatatcaacacattgcgtcttgattattggcaactgatcaaagcgtttgcaccgatagaattagatactgatcagtgggctgaaacgtgtaaaaaagctggcttcaagtattgtttgttcacaacgaaacaccatgacggctttaatctcttcaatacgctggagtcagaattcaaaattggcggtaaattgagtccttttaaacgagatatcctaaaagaagtttttgcctcgttccagcaagcgggtattgctactggggcttattattctaaggcggactggtactcaccgttttattggctggatgatgaaacgatcaaagggcgtcacgcaagttatgatccattagaacagccagaaatctggtcgcggtatgtggattttgttcatcgacaaattcatgaaatcactggcaactatggaaaagtggatttgctatggctagatgccggctggtgtgggcaggggaaagaagatttacagatggatcgcttagcggagattgcccggcgaaaccagccagaattgatcattgttgatcgcatgatgggcggtagacatgagaattatgtgacgccagaacgcaagattccttctttagaagaaatcccaacaaaagtttgggagagtaatatacctataggcaatgactggggctatgttccccatgacacctttaaaagcagccaagagttagtcgatacattaatcgatgtcgtcagtaaaggcggaaacttaattttaggagtgggtccaacaccagaaggaactttcacgaaagaagagacccagcgcctgcttgaagtgggtgattggttggaacaatatggggaaggcatttacgagacccgagctagaccagaagcgtggacggagaattggcatcttacctatagcaaagatcaaaaaacacattatgcctttcgcagtatcacaacaaatttgcagccgcgaatttttctgaaggagatccatgcagatgaaaaatccgtgatcacagatttagcaaccaatcaatcactgacgattcatggaacgggtgaaaacgcctatattgcttcatcagaagtgcatcagcctgaacttggagcagttggcattcgcatttctacacattgaagaaaaaatacacattgctttgaaagcgaattcatttcatatttagtatacaaaccaaaaacacaaggaggagtatgaatggaaacaacaacgatcagagagcctgtgtcagcatcaaaaagtaaaatcaaagaaatgaagactaaattaaaaaagagtcgacagttatatttgtttgtcctgcctgcttttttgattattctgattttttcttatgggccgatgtatggtgtgatcatcgcctttaaagactatatgccttctttgggaatattcgaaagtccttgggtagggttcaaacattttcaacgcttttttgattcttattacttctgggatctaatgaaaaatacattaggtatcagtttgtactctttgatcgtcggatttccgctaccaatcatccttgcactggctttgaatgaaatcaaggatggtccattcaaaaaaattacccagacagtcacgtatgccccaaactttatcgcagtagtggtaatggtcggaatggttattgcatttctgtctccttccactgggatcatcaatcactttctagattttatcggcgtgggaagaatcaattttatgactgaaccgcggtggttcaaaacaatctatgtattatcaggcgtctggcaaggcacaggttggggatcggttatttacttggcagcattgtctggagtggatactcagctgcatgaagctgccaccatcgatggtgcttctcggctccaaagagtttggtatatcaatattccaacgataatgccgaccatggtgattttactgatcatgagttttggtagtttgatgtcggtgggattcgaaaaaatcattttgatgcaaaacccattgaatatggaatcatcgaatgtcattgcaaccttcgtttatcagcaagggcttttagatgcacaatatagttttgcagcagctgttgggttattcaactcgttgatcaattccattctcttgattttagtcaacgggattgcgaaacggctgagcgattcgagtctcttatagaaaggtggtataggaatgaaaacaacttcattagtgaaagatacacgtgcagataaaatctttttggtttttgtttatttctttttagccatagcattactaatcgttctctatccattgatctatatcgttagtgcgtcgatttcaaatcctcatttagtcaactcgggggaaatgtggttattgccaaaaggggtcacctttgaaggctatcgaactctcttaggcaatagcagcatctggcgcggctacttaaatacgatctattacactgttttaggaacatccatcaatttgttggtgacactgccttgtgcttatgcactctccagagatgatttttatggcagaagagcttttaccaatttcatgctagtgacaatgtttctttctgggggcttgatccctagctatttactgatccgcagcttagggatgttgaatacggtttgggctttggttatcccaggagctgtctctgtctataatgtggtcgttacgcggaccttttttcaaacgacgatcccaagagagatggaagaagcggcaatcgtggatggctgctcggattttcgtttattcatgcagatcgtactgcctttatctacgccaatcattgcagtcatggcacttttttacggggtagggcactggaacagtttcttcagcgcattgatctatctgtcagataaatccatgtatccattacaaatgattttacgggaaattttgattttacaagatatgtcatcaaatactgtcagcaatgtgacttccgaaatggccagtatgttatacagcaagcaacagttagcagaggtcatcaaatacggtgtcatgatcgtttcatcattaccggtcattattgtctatccatttttgcagaaatattttgtcaaaggcatgatggtaggatcaattaaaggataaaacatagaggaggaagaagatgggaatgaaaaaaattttaggagtaacaggggtgtttttgtgcagtgcacttttactcagtgggtgcgggaacacaaaaaaggaaacaaccggagaaaatgaaggggtagccatcaatcatgacagccaatttccgatcattaaagaaggcgaagaactgacgctgaacattatggcgccaggagtaggtatggcagaatgggaagatatgccgacgctgcaggattatcaagaaaaaacaggaatcaaactgacttatacgacacccccttctgctgactttagtaccaagttgaacttagcatttgcttcaggggatctgccggatatcgtttatggcgcaggatcgaattcgctcacttcttcaatggagatcgattatggttcccaaggaattctgctgccgttagaagaatatatcacgccggaaattatgcctaatctttatgcattgacccaagaagacccgtccatcttaaaatcgatcaccacaccagatggccatatttattcattgccgatgatttcgagaaatgcgacatctatttggtggcaaggtccgatgtggtacaacggaacgtggctagataagttgaatgtcaaggaactgccaaagacaacggatgaattgtatgatttgctgacacgattcaagaacgaagatcccaatggtaatggcaaagccgatgagattcctttgaccgatgtcgatatgaattcaacaagggtatggctgatggcagcttttgggttacggacacgaggcgttcaagtagatgatgatgtggtttcttatacaccaatctcggaaaactataaagcattccttgagtatatgaacaaattgtatagtgaaggtttgttggatgcggaagtttatggccaatccgacgaacagaaaaaagcaaaaggacaaaatgatcagttgggcttgttcgccgattacttcagcttctttacgacaggccgcagcgagattgaagcgatgaacgatgccatgttccaaccattgacttcaaaatggtcgccagaagcagtgattccaggaagtccacgaatttctcggggcacctttgccatcacaaatgtcaatccatcgccggaagcttcgatgcgctgggtggattacttctattctgaagaaggtacgaaatatatcgaacaaggacctgaaggcgttctttgggagtacaaagaaaacgctgacggccaaaaagtacgagtttatgcagaaggcattgatacagaaaatacagaagatgaacgtggcaagatcacaccagcatacgggttgacaacaccgaacattgttatcgatacgacaggtgaatatcaaatcttgaaatccgcggatgaacaacctgatactcgtttcagtgactgggtggccaaagaaacagcagataagatggatgacattgcggaagtgccatttccattactttatctgactgtagaagaaaatgataaagtggctgctacggctactgacttgacaacgtatgtcgaacaaatggaagccaaattcattacgggtgtcgagccaatcagtaattgggataaatatgtttcgacgatcgagtccatggggatcgatgactacatttccgtttaccaaacagcatatgatcgttggaaagagaactagagtcacggcaataggagaagcgggcttggacaatttcttgtctacccgcttttttcctcctcagaaaccgagtaaaggagagaatacagcgtgcagttatttgaatttgaacgtatccgtaagattttatttcaattaaagaattaccggattcgctatcaggtgcctgttaatgacttgcagttaaagcaagaaaactgggcaccctatgtgcaaggaactttttttggagaaaagaattgttattacacaatgaaaggaacttttgaactaccggaagactggaaagagatgtcggttgctttgcaagtctattcttcgctctctgaatgggacaatacgacaaatccgcaaatgaaagtgttcttgaatgggaattacattcaggcaattgatgtcaaccatcgagaagtgcggttggatccctcggagctaacaggaacaatagccttacagatcgatattttttcgggacgagaagagaagaagtttccgctttacgtgaatctattggcgatcgatcctatcgttgagcaagtctggtttgatttctcgacgatttttgacagttggcgtgccattaggaaatttggcggagaagaacaaatctatcaaagctgtctgtcacaagctgccaatgcattagattttcgagccccctatacgccgcgattctatgaaggcctcacaaacgcgcaagaatgtctgcaagcgtgttacagccaagagattcgtcaaaaagtgaccgcagtcgggcatacccacatcgatctggcatggctttggacggcacagcaagcggttgaaaaaggagaacgcagttttcagaccgtattaaaattgatggatgaataccctgaatatacgtttctccaaagccaaccccagttatatcaagcgatcaaagaacaatatcctgagttatatcaggcaatcaaagagaagattaaatctggacgctgggaagtagaaggtgctatgtgggtagaagcagattgcaacttgacctccggtgaatcattggtaaggcagattttatacggcaaacgctttatcaaagaagagtttgatcatgagagtcagattttgtggctgccggatgtttttggctattccgctgcattgccacagatcttgcaaaagaccaatacaccttatttcatgacaactaaattgtcttggaatcaattcaatcagattccttatgattcgttttactggcaagggatcgatggcagcagagttttgactcactttattacaacgatcagtgaaggctacagtccaagaccctactacaccacttacaatgggcttttagacccttatacagtcaaaggcagctttgaacggtaccaacaaaaagatcagcatgatgagatcttgattgcatacggctatggagacggcggcggcggacctactagagagatgctggagacaaaacagcggttatcaaaaccactccctcagatgccagtgatcactggcgatcatgcgggcaaattttttgaccgattagccgcagcttttgctcattcagaagccccggtctggtttggcgaactctattttgagtaccatcgtgggacactgacctccatcggtaaaaataagaaagccaaccgcaaaggcgaatttttattgcaaactattgagaagctttacagtgcctatcgaagcgaagcgtatccgcaagagctcctcgaaaggctctggaaaaaattgttgttcaatcaatttcacgatattttgccaggaagttcgattggcgaagtgtaccagcagacagaagaagagtatgctgctctttttgaagaaggcgagcaattgatccagtccctcgtggcaggaggaaccgccagtgatgcaaatcatcaggtggtctataatccattaggctttactcgtgatgccgtaatcaaagttgatagtccggcgattcaagaagattatctgacacagcgaaccgaagatggttgtttgctggtcaaagttccacaagtccctagcttaggtctgcgtcccctaacgttgagggagactatctcagaaccagtagaacaagagtgtgttccgttgactcgtcaactggaaacgaccgactttgtcgtaacatttaacgcggcatatgaaatgactgctctttttgacaaaagacaccagcgagaggtcttgccagcaggagaagtgatgaatcaattgattgcttatgaagacttaccgatggattatgatgcgtgggatatagacatctactacgatcgtaaagcttatccagtagaggatgtgactgacgcatcaatcgtcgagcaaggcgagattcgtgacacgatccgtatcaaacggacgtttgagcaatcaacgatcattcagctgatccatttctatcatggaaccggcaggatcgactttgagacaacggtcgattggcatcagcatcatcttttattgaaggcgcagttgccaattgccgtcaatacgctagatgccactttcgatatccaatttgggaatgtcaaacgtgccatccacaaaaataccacttgggatttggcacgttttgagagttgtgggcaaaaatgggtcgacttgtctgaagatggttatggcgtcagtgtgttgacggattgtaaatacggattcagcacagcttaccaaaaaattggtctctctcttatcaagtcggcgactgatccctatccagaagcagatcaaggacttcattcgtttacctattctctctatgttcatgaaggtgactggaaaaaaggacaaacgatggaagaagcgttggcactcaatgtaccagcatatgtattggcagattttgatcagcagcaagagcaatcttttttacaagtggatcacaataatgtgctgatcgattcggtcaaaaaggctgaagcagatgaagccatcgtggtacgtttgtatgaataccacaatcgcaaaacgacatgccgcttgaccgcagctaaaaaaatcaaacgagcagtgctaacgaatttattggaagaggaacagcaggagttagtggtcacgggcgtgtgccaccaagtggtgattcctttcaacccttatgaaattcaaacggtcaaggtctattttgactaatcggcatttttgatgataggagtttaaaatgatcgaagaaattgtaaagaagatgtccctaaaagaaaaaatcggccagttgaatcagcgattgtatggctggcaagtttatcagaaaaaggaaggaaaactttatttgacagactacttcaagtcggaagttgctcgctttggctcgattggctggatctacggcgttttccgagcagatccttggtcgggcaaggacgcaacaacgggtctctcggtggaagaatcacgggaagtcagccggatgattcaggactatttaaaagaacatactcgtcttggaatcccagcttttttgacagaagaatgtcctcatggtcatcaaggattagcagcaacaacactgccggtcaatttcagtacaggggctagttggaatcctgatctttatcagagcgtgcagacgttcgtggcacaagagttacgagctaaaggggcgcaagttgggctgatctctaccttggatatcgtacgagatcctaggtggggacgaaccgaggaatgtttcagtgaagatccctacttagccagttgttttacgcaagctgcggtcaagggaatgcaaggggaaatacttggtcatgaaccgacaacccatgtactggccgtgttaaaacattttgcagctcaaggttcaagtatgggcgggcacaatgcaggaccagtcaatattggggagcaagaattgcgagagattcatttacccgctatgctggcgggaattcaggcaggggcactagggtgcatggctgcttataatgattgggatggtgtcccttgtcacgcgaaccctcgcttacttcaagagattttgcgagaggaagccggctttgcaggagttgtgatggcagatggttgtgcgttggaccgtttagcggattggctaggaaacaaaccagaagcggcagcccgggccatgaacagcggcgtagacatcagtttatgggacaatgttttccctcagttggaagctgctgttgatcaagggttgattaagcaagaaaccattgatcaatccgtgatgcgcgttctgaaactgaaagagcagctaggactttttgacgaaccggtgcctacggtgtccgttccggatcaaaagcagtttcaagaaagtgcaactcgtttagcagaagaagccatcgttttgttgaaaaatgagcaagtcttaccgttaaagaaacaaagacaaacaattgctgttattggtcctcatagcaaaaacagctatcatcagctaggggactatactcctttcaaagaactgtctgagtgccgcaatctgtgggaggggttgctggaaatcaaggggaccgaaaccacttttattcaagcagatggctgcggcatcacagaaggaaccaaagagcaactgactgccgcatgccaagcggcagcaacagcggatcaaatcattttaacgattggcggctctagtattcgtgacttttcgacggattttgataagaatggagctgccttgcaaggatctgcggagatgaccagtggggaaaatatcgatctggcgtctttggcattgccagaatgtcaaaaacgattgattactgaattgaaaaaatttcagaaacctctgatcggtattgtgattgctggccgtcctcatctgttaagtgaggtcagtaccgcttttgatgcgttgctttttgcaggttatccagggcaatttggcggaagtgcgctagctcggattctttttggcgaaacgaatcccagtgggaaactagctgtttctattccagatgaaaatgggcagctgccagtttattacaactaccgtgaggctgctttccagagagattacacagattgttcaggaacccctcgttatgggtttggttatggtctaagctatgcagaatttatgcttaagggaatccatgcgcagtatgctccgcaagcaatccaaattaatggaacaatcgagaatctttcggtgatagcaggagctgaagtggtacaagtgtaccttcgcaattactcacagcaggtcttaccgcgtgtcaaagtgttatgcggttttcaaaaagtctttttgccagccaaaagcaccgtcgacttttctctaacagtttcttatgaaacgttgaaacggttgaacatttcaccaaatgaattgccagctgattttatcatccaagtcgaagcagccaatcagaaacaagtattcacgaagccattgaaacaagaagaaaatggaaaaggagagaaatcatgttaaaattcccggaaggatttttatggggagcagctgcttctgctcctcaaacggaaggcgctgcggcgattgatggcaaaagcccttcaacttgggataaatggttcgaattggagccagacaagttctatgatcacgtaggacctagtgatacttcgaatacctaccgacactttcgagaagatgtggcgctgatgaaagccatgaatctgaactcttatcggacgtcaattgcttggacacgactagtacctgatggaaagacggtcaaccctcaagcagtcaccttctatcgtgcctattttcaagaaatggtcgatcaaggaatcgaacctatcatcaatttgttccattttgatatgccgtggtggttaatggaaagaggtggttgggaagccagagaatcggtagattactttgccgcttacgctcgtatcgcctttgagcaatttggcgacattgtcaaaaaatgggccacattcaacgaacctttagttcatattgaatgcggatatatgggggatgcccattggcctaaagttcataattttaaacgagcgatccaagtaggctatcatacactgttagctcacgcaaaagcagtagctgcttttcgcgaacttgcgattcctaacggagagatagcgattatcttaaatttatcgcccgtctatccgaaaagtccgcagtctgctgatcttgaagctgctgaatgggcagacttactctatattcgcagttttttagactgtacagtcctcggacgatttccagaaaaattagtcgcgatgctgaaaaagtcaggtcttgctcctgtaacagaggagggggaccgagaactttttgccttaaatacggtggactttattggttgcaattactaccagccattacgagttcaagccccgattgcgccgaacgatccaatcacagggccgagggatctttttcgaggctatgattggccggacaaaaaaatcaaccctcatcgcggttgggaaatctttccgcaaggtatttatgacattgccatgcgtctaaagaatagctatggcacgattccttggtatatttctgaaaatggtatgggggtttctcaagaagaacgcttcgcaacgcaagagggggagattaatgacacctatcgcatcgaatttgtaacagatcatctcaaagaactgcagcgggcgatcgaagcaggagccccttgcttcggttatcatatgtggacatttatcgattgttggagctggctgaatgcgtataaaaatcgttatgggtattatcgagtagatttgacagatgatacccgaacaccaaaagcgtcgagcttttggatggcgcaagtagcaaaggacaatgggatcgattcagggaatggacctgattagccagcaaataaagcatgcttcagagggacgattggacctctggagcatgctttgagtgtttcaactgattttattttatgcttaagtttcgaccactgaatttagcaggcgcatttgacgatcagagatatttgtgacgatagtcagcaatggcctgtcttgattcgtagatattttgagccagctgttcatttttactcaaaaagacatagaacagcacatcaactgccaaaagatgagcaataatcgagttggttgctgcactgcgcatattggcttctttcggtcgggaaacttgcagcggaacatctgctaatttcgaaagggaattactgccaaagcgagtcaaagatagaactggaatccccatctccttcgtaaactccgcaaggtgtaggatttcaggtgtttgaccactgtttgagacagcccagagcaaacattctttttcgtgtttgatcaattgaggcaacagcgaattatagtcggtttcgaaaataaccactttgcctaagcgagtccatttttgttggatatcttgagcaatcaaagaggaagcaccgataccacatacgaagatccgattgcgggttttcagtaggtccgctgctgccagcattacttgttcttctaaaaggtccgcagtctcatgcatagtcacttgggcattatggctcaatttcgcagtaatatcatgaaaagattcgttcaatgcaacatctgcatagccaatgatctcctcatgggtttgtcgggagccagattccgcagaaagctgaatcttaagatcagttaggctggaaaagcctgttttctttgcaaaacgaacaactgtaggggcgctgatcccggtagcttgagccaactgactcgcagtcatcgaaggaactttttcagaattttttttgatgtaatcaaaaagttttttttcggaattggataattcgctctggatactttcaatgcgagaaaggacgctcataaggtcacctgctttaagaaatttctagatttagtataccataagttggagtgttgctttcattttaaaatgaaaagattcagcgaagaaacttgcatttttaggtagaataaagtaaagtaattacgtgtgaatacacgctacctgttacttggttcaacgagtcaccaacgttttactcagtcgcaggtgaaaaaagaaaaaagaggtgaaaaacatggcaattacgaaagaacgcaaaaacgaaatcatcaacaaatttgctcgtcatgaaggagatactggttctccagaagttcaaatcgctgttcttacagaagaaatcaaccatttgaacgaacatgcacgtatgcacaaaaaagaccaccattcataccgtggcctaatgaaaaaagttggtcaccgtcgtaacttattagcatacctacgtcaaaaagacgtacaacgttaccgcgaattgatccaagctttaggattacgtcgttaatcaaacaaagaaaagtgaggttcaacccgaatctcacttttttgctatgaatcactgcgactgggcggcacaagccgtacagagcagatgatgaatagtactaggcgactaaccaggagcgtagtcacccgagcggaatcactgcgactgggcggcacaagccgtacagagcagatgatgaatagtactaggcgactaaccaggagcgtagtcacccgagcggaatcactgcgactgggcggcacaagccgtacagagcagatgatgaatagtactaggcgactaactaggagcgtagtcacccgagcggaatcactgcgactgggcggcacaagccgcacagagcagatgatgaatagtactaggcgactaataatagtggccccatctttttaacaaactcaattagcgggacttgactggtgaatcaaacccgcaactaaaaaagaatctctgagacacggcgagcagcttcctactaaccaaatgaaagcagcggaagcaccgatccacttttttcatttgtttagtagtgacttgcttggctcagaaaaaaaggagcagatcatgacagaaaaacaagtattcaaaacgacttggggcgggcgtccgctacaagttgaagttggccaattagccaaacaagcaaatggcgcagtactcgtccgctatggcgatacagtagttcttagtgcagccgttgcttcaaaagaagcaaaagatacagacttcttccctttaacgatcaattatgaagaaaaaatgtacgcagtcgggaaagttcctggtggtttcatcaaacgtgaaggtcgtccaagtaccgaagcaacattgactgctcgtttgatcgaccgtccaatccgtccaatgtttgcggatggtttccgaaatgaagtccaagtgacaaacattgtcatgagtgtggaacaagattgctcaccagcaatggctgcaatgctaggctcttctttagcgttgtctatttccgatgtgccttttgacggaccaatcgctggtgttgaagttggccgtgtcaatggggaatatgtgttgaatccaaccgttgaacaagcagagcaaacagatatcgaattgacggttgctggtacgaaaaaagccatcaacatggtagaatcaggagcgaaagaagtttctgaagatgatatgttaggcgctttgctgttcggttttgaagcaatcaaagaattagttgctttccaagaagaaatcgttgcagcagtcggtaaaccaaaaatggaagtgactttgcttcaagtagatgctgacttgaaaaaagaaattttcgatggctactatcaaacaatgaaaacggctgttatgaccgaagaaaaattggctcgtgaagacgagatcgacaacgtcaaagaaacagttaaagaagtttatgcagaaaaatttgcgggtcatgaggatgaagcgcagcttctaaaagaagtgaaacaaatcgcagaagaccttgaaaaagatgttgtccgtgaattgatcacgatcgacaaaattcgtcccgatggccggaaattggatgaaattcgtccattagcctcagaagtcggtctgttgcctcgtgttcatggttcaggactattcactcgtgggcaaacgcaagcattatctgcttgtacattggcaccattgggtgaacatcaaatcattgatggtttaggggtagaagaatcaaaacggttcatccaccactataatttcccgcagttttcagttggttcaacaggacgtgccggttctccaggccgtcgtgagatcggacatggcgctttaggtgaacgtgccttggcgcaagtaatcccaagtgaagaggatttcccttacacaatccgtttagtggcagaagtattagaatccaatggttcatcctcacaagcaagtatttgtgcgggtacattggcattgatggatgctggtgttccaatcaaagcccctgttgctggtatcgcgatgggacttgtctctgatggcgaaaactatacgatcttgaccgacatccaaggattggaagatcatttaggcgatatggactttaaagttgccggaacaaaagatggaatcacagccttacaaatggatatcaagatccaaggaatcaccgagcaaatcttaactgaagctctatcgcaagcgaaaaaagcacggatggaaatcttaaatgaattgacttcaactattgctgcgccacgggaagaattgagtccatacgcaccgaagatcgagatgatccaaatcgacccagccaaaatcaaagatgtgattggtaaaggtggcgacacgatcaatggcatcattgatgaaacaggcgtgaagatcgacatcgatcaagacggaaaagtatcaattgcttcttctgatgcggaaatgatcaagaaagctattaagatcattgaagatctaacaaaagaagtcaaagttggcgaagtttatttaggaaaagttgttcgtgttgaaaaattcggcgcttttgtcaacttgatcaaaggcaaagatgggttagttcacatttctcaacttgcaaatgaacgggtcaacaaagtagaagatgttgtcaaagaaggcgatgaagttcttgtgaaagtcacagagatcgacaaacaaggtcgaattaatttgtctcgcaaagcattattgactgacgataaagcagagaagaaataattttcttaactagttatccgcaagagaagattttgcaaacgtaaatcaacgtccaaccccccagtaatcgattcgtttactggggggtttttacgacataaggcacagacatttcgctgataataaggtaaactgactcaaagaggtcgggcaatcaaaaattcaaaaaacgtatagaaggtgaaaaaatgaaagccacacagggaagtgtttttcgacgacgagaggccttgatcacctacttagataagtatgattatgggactgtttcagaattagcggatcgatttcaagtatcagaagtgacgattcgcagggatttgttgtttctggaaaaaaagcagttgattgaacgttattatggcggcgtgaaacggatcaagaaatcagaaaaaagagaatcccagcaacttggatcggtagaagaatttccttggcagcgactgcttccaccgttacaccttttgctgcaagaaaagaaattgatttttgtgggggctggacgctggtcgaaagaattgatccacgcagttgctgattttgatttaacgattgtgaccaatgaccattccgcattgattgatctaaaaccaggacgggcgattgtttgtctgtgtggaggagaagtggaaagcaactccactgcgttagtcggagatatagcgacactggctttcagcaaatatacggctgatttgtgtttgattgaagcctcaggaatcgactcccatgaaatcacaacaacgacactaagtgaatcctttgtgtatcggacgatgcttcagcatactcaaggagagaaaatcatctatacggaaggagaaaatatcggccatgtccgaggatttatgattgatcgtacgtttatggcgaatcgcttgtttagcaataggcaacttacagagatcgagacggcgcaattttcttctcaaggtctgcagttttcgctgctatgattttaatttggcattgaagcttttctcagacaatcaattaaggagaatcgttcataaatattctttcatgaacagttcttgtccggctattgcttttgatcaaggagacgattatcctaaataccagaaagagatttactaaaaaagacaggagaacatcatgacatcaaaatttccaacagattttttatggggagcatccatttccgcacatcaaacagaaggagcttatttagcggatggtaaaggactaagtgttcaagatactcgtccccgagacaataacgagatcgccgattttacagtagcggtggatcattaccatcggtacaaggaagatatcgccttgttagcagaactaggaatcaaagtttttcgcttttcaattgcatggtcacggatctaccctgaggggcggggaagtgttaaccagaaaggattggaccattatagtgctgtcatcgacgaactgttgaagcagggaatccaaccatttattacgttaaatcattttgatttaccacaagctttggaagatcaaggcggctggacaaatcgcagtacagttgaagcttttgaaacctatgctaagacattgttcaacgcttatggtgatcgggtgacccattggttgacgatcaatgaaccgaatatcatgctcttagtcgatcgcaagatactaggcaaaacgattcctctacctgagaagtaccagcaattccatcatctgatgattgctgaaaagcttgccttcaaacattgccatgaactcgttccaaatggaaaaattggaccagtccctaatatctcgcttgtttatgcagcaaccagcaagccggaagacaatcaggcggccctttatttcaatagcgttcggaattgggcgtatttagattttgcctgcttaggacgctacaatacagtctttcaagattacttgaatcaaagtggggtgaagatcactatccacccagaggatcaggctttgatgaccagtgccttcccagactttgtagctatgaatttctatacaacggtcacagttgaacagccaacgatggaaggagacatgacgaatgggatcagtgatcaacaaagtgaagacatcatggaacgagggttttataaaggatttacgaatccctatttgaagaaaaatgcgtttaactggaccattgatcctctgggcttaaaaacgactttgcaaacactctatgatcgctaccatctaccaatcctcatcacagaaaacggtttgggagcagaagatcatctggaagaaaacggcgcagtccatgattcttaccgtatcgactatttgcagcagcacatccagcaatgtctagcagctatcgagtcaggagtggaattgattggctatagtccttggtctgcgatcgatttgatcagtgtccatgaaggcatcaaaaagcgctatggttttatttatgtggatcggaatgatgccgatgaaaaagagcaaaagcgtgtgaaaaaagatagtttttactggtatcaaaagttgatcgaaaacggacattgggagggataagcaatgaatcatgtttttacttttttagagcagcgattgatgccgccattaaataaagtcgctaacttgcgttttatccgggcaattatgcaagcgggagtcatcacggttcctttcacgatcgttggctcgatttttttgatcatcaataacctgcctcaaattattccgccgctggccagcttttttgaacagacgattttgaaattttccccgctttatagtgtcgcgacaactatgtctatcggctcgatcgcactcttttattgtttagccactgcgtattatttaacggacatctatcgcaaagaagaaaaactccaattgagcagctttgttggcgcaattcttgggttgtttgcatttttgatgacgatcattcaagtcgatatttcagatagtggggcacaattgcttcaaacaactggagagacagctatcatctataatggtgtagcacttggttcttgggtgacacggtttagtggggtcggtatttttatcggtatccttacggcggtgctggcaacccaagtctatcgtttttgtgttaaaaagaaaatcacgatccaaatgccagcgggagtaccagatggggtcagtaaagcatttgcttccctgattccagcgattattattgcttttttgatgattctgatcaatggctgtttagccgtttttcataccgacttgcatggtttgttgtcaaaaccatttgaatttgtaaaagatttgacaggttcttggctagggatcattgtaatcatgttgttgattcatttgttgtgggccgttggtgttcacggaacagccgtcatcaaaaacagttttatcaatcctattttattagttgctttaaccgaaaacatcgatggagcaaccaacatttttgccggtgattttgtcaatatgtacatttttattggcggtgctggcagtacgttagggttggtcttgttgatgctgtttcgagctaaatcccaacagttgaaagtattgggcaaagcggcgatccttccaggattgttcaatatcaatgaaccagtgatctttggtgcgccaatcgtctataatccttatttgattattccttttattgtgacaccgctgatcaatgtgacgattgcttattttgctacatcctttggctttgtagctaaagtgatcaccgggattccttggatctcacctgttgggattggagcatttcttggaactggcggtgattttcgcggaatcttgatcgctatccttaatttattgatttcggttgtctgctattatccatttttccgaatgtacgatagtaaactttttgcggagcagcaagcaaacgaagcagaagcgactctccatgatcagtagacaaaaagagcgtgggacaaaagtaaaaaacacttttgtcccacgctctaaacacgtctaaatggcggaagcagaagcaactccgagaaattaatcgaactaccccaaaatttgaaaagcaatttccgtgtattcctccttattttgcggagtttaacatttctgtcgcagcctcttttttagcgaaaactataatccgacaacgaaatatgccgggcatgacaccagtctttgacagaaccggagaaaattagcggtacattggtcaaatcctgtgtcagggtttgtccgaccatggtgtagagcagctgaagctgttctttccaagactggatggtggcaatcgtttcttcaggtcctttatctaagagcatggtcaaaatcgtagcagagattccgacacttttggcaccaagacataaagctttgaaaatatcaaaggcatctcgaatccctcctgaagcgattgtcgtgaaggagtgttgcacttcgttggcttctagtaaagaaataaccgtcgattggccgaagtgattcaagtaagctatttctcgtttttttctgcgggcattttcaatttgggtaaaactcgttccgccgctaccagcaacatcgatcgtttgtacgcctaccgaaatcaattgctgaatagtctctcgggtcataccaaaaccgacttcttttacgacaactggtactggagccgcctttacgatttgttccagcagacttagccaattgctgaattcacggtccccttctggcatcaccaattcttgaggggcattcagatggatctgtaaggcatcggcttcaaataagtcgatcgcacgcaaggcattttcaacggaactaccagcaccgacatttgctaaaagaaagccctctggattgacttggcgaacgacttggaacgtgtcggacagcgctgggtcttttaatgcagctgagacagaaccagtcgccatcatcaggtcacaagctttcgcaacttcagccaagtcttggttgatttttttgcttttctcacttccgcctgtcatggcgttgatgaaaaaaggggtagcgaaagagcggccaaagagttccgtttccaaagtgacttgtgcgctatcgatctcgggaaaggactggtgaataatttgaaccgcatcaaaatcattcaaccgtggcttgtgaaaggcttttgccaatgagacgtgttcatcttttcgattcattaaatctcctcccgataatgatagacatgcagcggcaatggaataatgtcggctttttcccaagcgctcatcaatggtaagatcccggttttttgatcgacgatcacaatgccgcaatccccgccgccagcgcctgaagacttggcggccccgcgataggtttctgctaagtcacatagtttctttaaagcgggtgtttcaatggttacaccagtcagactagataatcctacaagtaattttcgattttcggtaatcatttttttgattgttcggctgtcttcatttaaaaagccatcaatcaaacgattgacacagtctttgctgtctgccaaaaatttggcatagcccttttctttggcttcttttgattggtagacttggtcaactaaatcagaagtggaagcaggactacctgtccacccaatcaacaggcgcaatgattttgggacaatcaatggacggatcgaaagctctggccaatcactggtcaatagctgagtcaatgtccattcctgctgttttcgtaagacccactcatgatcaaatgtggaaaaagccagccagccgccatagcaagaagcagcaatgtcaccacacgagccattcccttgcacggccaaatgggccaatgcggcgatcttgaattgcgtcaagcgatccatttttagatcatagtagaggttgagtgctttgacggtagcaacggtcactgcaccgctagaaccaagtccatattttcgaccgttggaattatctaactcactcgttacttttaagtcataaaaagagagcagggttcctttttcttgagcgtatttttctgttagacgaatagcagctagaatgtaatgaaaaggattttctcggtggtccagtactagttcgccattgcggcgggtccagcggatcggcaagtcactgtactgggcagattggatactgccgtttttgcgggcgccttcgatcgtcacattgatgaattgatccaccgcaacgatgatcgctggatgtccaggttcaacgaccgcatactcacctgcaataaataatttgccggggactgagatttctatcatttcgacactccttcatttgtcatagacggatcggtcactgtcattggtaaatcaaccaacccttgtcctgcgtgagcaacgattaattgttcaggatgaaaatcttttttcagctgggttaatatagcttcttcgtcttttctttgacaaagcactttgacatttggtccggcatccatcgtaaagtagcaggccagccctttttgacgcaaggaacggacgcaatccattgctcgcaaggattcaggagaccagtaggtgaacggtggagtcgccgccatagtagtggcatgcatttttagggcattggcttctgtcgtttcacctaataactgaaagtctttttcgcggatggcttgctttaactttttcaaatcgtgtggtgtgctttctagccaaccagaataatagctggaagtctctacagtccgacgcatcccgtcacgactggaaacatctttttctttgtcgttgatcaaaatgaaaagcatacttagctctttttcccagccttccgaagcaatcggtgttgcgtaagacgtgtcatcatcaccagtatgccattcgacaaagccgccaaaaatactgcgacaagcagagccagatccccgccgagcgagacgggatagttctgtttgtgataattgtaagtcaagtgctgcgttacaggctccggctaaagcagctagtccactagcagatgaagcaagaccagcagctgttggaacgaaattgcggctgttgacttgcgcgaaaaaaggacaattggcttttgcgcgtacaagatccaaaaaagcggagattttcttcgttgcagcctcactctgctgtttgtcatccaggaaaaaacggtcttgagtatattcctctgaaaaggtaacagaggtttctgtatagaaagcatctaacgtcaaagataagctgttattcattggcaagatcagtgtttcgttctccttgccccaatatttgatcaaagcaatattcgtgtaggctcgcgcctttcctttatacatgttcgtaagctcctaatccttgaatccaagtggcatgggcgccattggacaataaaatacggctgatcacttcagcctgtgtttttgtttgagtcaaagcgatcatacagccaccgcggccaccgcccgtcagctttgcgccaaaagcgccattggctaatgccagtgacacgagatcgtccaggttttgattgctgacacctagttgccggagggtctcatgtgcgtgggtcattgcctgacctagctgcgtcagctgattatgtaagatagcttctttagcggtctttgctaaagaacctaagcggctgatagcctgactcgtttggtgtttttgcgtttcaaacagatgcgcgacgcttttgacagctgtgcgggtctgacctttgatccctgtatcggcgactaacaaaaagccatcgatcgtcaatggaaaagaagtaatcggctgccctttggtaaagtagatcgcctcgttgccgcttgttgctgcagcatcaataccgctaggatttccatgcgcgattttctcagaaaaatcgacataatccaatagccgttctttttttaactctttgtgctgccaatcaaaaaaggcccgagtcaacgcaactgcaactgccgcacttgaacccattcctcgttctgaagggattgtactaacgatcgaaacagaaaagggaccggtttgatggtcttgctgcaagcgatgaagaagttctttcacattttttaaatgcgaaggagcttcttctagtgggccgtggtaataattggaggttaaatcattcgttaggctggcagtgatcgtcacgtggacctttgcgccagcaaatggaaaagcgatggcgggttcaccatagacgaccgaatgttcacccattaatatgattttccctgtagctatgccagtaccgagtgacattcattatcctcatttctcttagaactgcagcagaagtcaaaagaatgtctcagaggaagcagcaggcaaaaaaataaaggttcccctttgatcctgtgagtcattcttttaaactaagctgcaatctacttaataattactagtgatttcatcatagatccttgtttttccgttagaacagaaaagttcgcagaaaaacgaataaaagattctttcttattttactagaagaaggctgtttcgttaagcattccgaaaaagaaatcgtaaaaaactgaaaatatttaaacttttattgaaaattttttgtttttatgcttcaaaagcgctgggttgacgatacaatatctagtagtgtatagttgattacgcaaatgaaacatacaatatttagtgatgagtgagttgggggatatgagcgtgatcgtattagcaggaactatcggcgcaggaaaatcaagtttaactgcattgttagctgatcatttaggcagtcaagcattttatgagtcaatcgatgataatgaagtgctgccgttgttttatgccgatccaaataaatatgcttttttattgcagatttattttttgaataaacgttttgatagtatcaaaaaagcattgaatgatgataataatgtattggatcgatccatttatgaagattcactgcttttccatttgaatgctgatttagggcgagcaacggatacagaagttcgggtttatgatgatttattggccaacatgttggaagaattgccttatgcagctcataaaaaacatccagatttattggtccatattcgggtttcttttgaaactatgttagaacggatcaataaacggggacgggaatatgaacagttatcctttgatcctaccttgtatgactattatcaagaattgaatctacggtatgatcaatggtatgaagaataccaagaaagtccaaaaatccaaatcgacggcgatcaattcaattttgttgaagatccagaagcagcccaaaaggtattagcgatggtcgacgaagcactggcaaaagtgcgcaaataaagcaacagctggagtccagcccataaaagtggggattccagctgttttcttttataatagaagaaagcgaacatgtaacgtgtggagggaaaccagtggaaaaaaaacgattttacaatggccgttatgaatggattcaagtggatcaacaagacagtagcagtattgcgcgtttacaaagacagcaccagttgactgatgagatgttaacttactcattagacaagaatgaacgtgcccgtgtggagttcgatactgatgatcaagcattgttgttggtgttcaacgtacctcaacaagaaaagaaagacaatcattttgaaacaagtccgatgacgtttatcttaaaaaaagatcggctgtttactttttcttcgagaaatacacaatatgtgattccgatgatggaacggatactcgtgcaaaatcctttgcaaacaccgattcattttctttttaatagtctttttttgatctcaggaactttttttcctttagtcgaagaagtcaatagcgatcgcgtgcatctcaatcaacggctgcgggaaaagaccaccaataaaaatttgttggagatgtctgacttggagatcggactcgtttatctggtttcggcaacgaaacaaaatgccgttttattagaacagatcaaagctttgtcgttctttcgtttaatggacgacaatgaaaaagagcagttggatgatgcactgatcgaagcgaaacaagccgttgaaatgactcagttagcgtttcaaattctggaacaattgtcaggtacgtacaataatttgttgaacaacaacttgaacgacacgatgaaattcctgactgtttggtcgttgttgctgacggtaccatcgatcgttaccagcttctttggcatgaacgttccattgcccttcacgaataccgtgtttggctggggaatcgctctgctgatcagtttagtcttgtcaggatggatgttgattgcactctggcgcagaatcaagtgatgcttcagtcaatcactagacctaaccccgctgcaatcactaatgcttgttcttggtcaacgatcaatccccgcaacaattcttgcgaaagagcgattttctggaaaggattggtccgcagatccagctgatagagtttggttcggaaccaattactgtttgtaagctgattgtgctgcaactggagatttttccattggacttcgtaaaattctgtgtcattcagctggcactctgcaaagcggatcgttttgagattggtgttgctgaaggaagcaaaattgccgacgcaagattcaaatgtacagtcacgaaaataactttctgcaaaatttgtaccggtcagcttgcagtttttgaagtgtacttgatgaaagctagcgcccaaacattccatgttggaaaagtcgcagttttcaaagaaaacattttggcattcccaatgctctagtcttgtcttttgcatggtgacctttttcaagtggcactgttttaaaatgagacccgtacaagcgtcataactggcatcagtttctgtaaaaaaagcttgttcaaaaatttcttcatcttcaagataaaaatcttttgtttctgagtattcaataatcggtaaaagaggatccggctgcttttttttcattttgcacctcaaaattttgtttttttaatagtataccatgttttgagcgatgcctttagcagtgcaaagatgtttgatggatagattgtgaatttaattcaataggctaactttagttgctgaaatagcaaggttttatgaaaaataaatacgcttatattcacaaggttatgaattgttttaagaaaaatcttcatttcagaagcataattcaaggataattcggcaataaccagtaaaaactgtcatttttttaacggtttgcgaaaatcttgatagtttttaaattcacaatgtagctataatgaaaccataaacaaaagggggaaatttttccatgacaaaaacagtgattattggtgcgaaccacgcagggattgccgcagcaaataccttattagacaattaccaagatcaagaagttgtaatgatcgatcggaatacaaacctcagttaccttggttgtgggactgcattatgggttggacgtcaaatcgattcgtatgaaggcttattctatacaaaacgggaagattttgaggcaaagggagcaaaaatctatatggaaacaactgttgaccatattgattttgagaaaaaaacggttcatgcagtaacaaaagatggtgaagaagtggtagaaacatatgacaaacttgttttagcaacaggttcagtaccaatttcgccaaaagtacctggtcgtgatttagccaatattcatttcttgaagagattccaagatggccaatctgtggataaagaactagcagctgaagaagtaaaaaatgttgctgtcatcggggccggctatattggagtggaaattgcagaagctgcaaaacgtcgtggtaaaaacgttcttttatttgatgccgctaaccgtgcattaccaaactactatgacaaatggttcacggatgacatggatcaaaacttagcagagcatgggatcgaattgcactttggtgaattagctcgagaatacaaaggaaccgacaaagtagaagcagtggtaacggataatggagaatatccagtggatcttgtgatcaatgcgatcggcttcttgccaaacaatacattaggcaaagagcacttggaactatttacgaatggtgcctacttggtagaccgtcaccaacaaacaagtgacccagatgtttttgcggttggagactgtgcaacggtttattcaaatgcattgcaacaaacgacctacatcgctttagcaacaaatgccgttcgctcagggatcgtagctggccataacattggcggtacatcattggaatcaactggggtccaaggatcaaacggaatctcaatctttggttacaacatggtttctaccggtctttccgtagaagcagcagaacgtaacggtgtgaaagtgaagtattcagattatgaagatacgcaaaaacctggattcatgaaagaaaacgataccgtgaaaatccggattgtttacgaagaagaatcacgtcgggtgattggtgcccaaatggcatcacgtacttcagaaatcgctatgggaattcacatgttctcattagcaattgaagaaggtgtaaccatcgacaagatgaaattacttgatatcttcttcttaccacacttcaatcaaccatacaactacatcacaatggctgcattgaaagctgaataataaatagctgagggagctgtgacaaaaatcttgtcgcagcttcttttttcaaataaacgattagaagtagcttctttggaaccaagccgaaacttcaggtggctggtcacttttgttaagcgctcttttttgaaataatcatgaaaatcattgacaagaactaaaaaaagcagtatactataaaagttgagaaattaaagcagaagcacccgcttctcgcctgagtgactgtatcgctgggcagaataggattcctacattttgtgtatggagtacgtgcgggttcgtgaagaactcgttttttttattgtctgatttcgaatcgacaagcttttctttctctcaaaaaactcggaggtgaatgaccatagcaaaggatatgatggtaaacgacggcattcgtgcacgtgaattgcgtttgattgatcaaaacggcgaacaacttggtgtaaagagtaaagctgaagcattgcaaattgcagaacgagcaaaccttgatgtggtattggtggcaccaaatgcgaaaccaccggtagcaagaattatggattacggaaaatatcgttttgagcaacagaagaaagaccgtgaagctcgtaaaaaacaaaaagtaatcaacattaaagaggttcgtttaagtccaacgatcgacgtcaatgatttcaacacaaagttgcgtaatgcacgtaaattccttgaaaaaggggacaaagtaaaagcttcgatccgtttcaaaggccgtgccattacccataaagagattggtcagaaagtgttggatcgtttggctgaagaaacagctgatttagcatccgttgaacaaaaaccaaaaatggatggacgcagcatgttcttagtattatcgccaaaaaatgataaataatgactcactgagtttcagtttaaagtcagataacgaaagattttgaggaggaaattagttatgccaaaacaaaaaacacaccgcggattagcaaaacgcgtaaaacgtactggcggcggcggattgaaacgcttccgtgcatttactagccaccgtttccacggtaaaacaaaaaaacaacgtcgtcaattgcgtaaagcttctatggtttcagctggcgattacaaacgtatccgtcaacaattagcacgcatgaaataattgcgtcccaggctttacaaattcaaacaactatcgattttcatattaggaggaattatacatggcacgtgttaaaggtggaacagtaactcgtaaacgtcgtaaaaaagtgctaaaattagcaaaaggttactacggttctaaacacactttatttaaaacagcaaaagaacaagtaatgaattcatacaactacgcataccgcgatcgtcgtcaaaagaaacgcgacttccgcaaattgtggattgctcgtatcaacgcagcggctcgtatgaatggcttaagctactcaaaattgatgcacggtttgaaattagctgaaatcgacatcaaccgcaaaatgttagctgacttggctgtaaacgatgcaacagcatttactgaattggctgaccaagcaaaagacgctttaaacaaataaactcacgttgttctacaacgattgaacccgctcaatgagcgggttttttgtttcttccgctaagcaaaataccaaattcgcttgactaatggtatagtagtctacaatgaaatcggattcctgttaaggctgggaggatatcaaatgaaactagtaacgaggaatgaagtattggaagaatcaaaggcagtcctaaaaatcatcgcgggtaatagtttgttgggatttgcttatgcgaaatggatgaaacctaatgggatcatcaatggtggtgtcactagtatggcgatgattttagaaaaggtgaccaatgtaccgatcgtttatttgacatctggtattacgacccttctgctggttttttgttggctatttttaggaaaagccaattttttcaagtccattatcagcagtgttttttataatttattttttgctcttttttattatatgaagattgattttcaagtaaacctaatgcttgatttcttatttgcgagcttgttcatagcggtagggtactattgctgcatcacggctaacgcttcaactgttgggatggatgtgattgccatggctatcaacaaaaagcggcctgattttagtattgctcggggtatccgctatatcaactttatggtattaatattaggatttttgacttatggcttcaaatcagtagtaattggattactatttagttttgtcaattcttatctattagattttttgttgaaaagaagcagtcggtgatctatttggtgattcttgcttcctttcatccgcaataaaaacgacaaactaacagtattgatccaattcaaattggggttatttcattaattgactcgcctcataaatctcttgtttatacggagatttatgaggttttttttgttttttgtctatcaacgaatagagagaaaccgttaaaaatgcgcaatatgacaaaataagttgatttattttgaattttgtctttttcataaacaggtcaataagtgaaagagatttctcgatcccaaatcatgtgatttttaacacatatttcagaaaaaaacgaagttaaatgtccttatttattaaaaaaatgctcaagtctgagataaaaatcgcttttatccattcatttccaggcgcaaaatgataagaattactccttttttaaaaagattactaagtaagaatgagactcaaatacttattttttgaaaggattttgtcagttcctaatagcgaaaatatccgataatctgtttagataatctttgcacttttttaggagtgatctttatgtaaaacgaaaatgttggattggttgtttaggcatgtgtaggttaggaaagatttaaaaaaatatgaaagaaggtacagaaatgaaacgaaagaaaaaattagttacaaagttcgttgttgcaacaactcttttcacagcaggtagtttggtggttccagctgttggcactttatctgcctatgcagcgactacaggtcctgttgcagataatactagccctcgttccattacactttggaaatatgaagtgaaagatctatctgaactgggtgatcgtggcgatggagaaaaggatgatacagttacaaagtagccgttagcagggatcaaattccgcatacaacgggtaacggtaatcggtgatgctgctttaacgaatccattagatcaaaaagaaggaaccgattatacgattgacaacacatttactgctcaaacagtaacgacaggagcagatgggtctgtcaaagcgaatttgggtagcggcaatgcggcagatggcatttatttagttaccgaattagaagatgaccgtggtgtctctcctgccgttgcaaaaccagcagatccattctttgtgcaagtacctcaaacggaccgtgatgatctaggctcattaatctatgatgtagtcgttcaaccgaagaacattatggaatctttgcttgaaccagataagaccgttgaagaaggaaaaggtttctccaataaagcaggaaatcatttcacttgggaagccaatgccactcttccaagcggactctatcaaattgcagcgaaagacatggttattacaccagtttatgacaaagatggcaatcaagttgcggatattccagtctctgcaggcgacgaaatttacgctgactactatacgattcgcgatacattgaacgaaaagattttgttggatgggttaactgttaatacgaagacagattccagtgactgggtagcacttgaatttggcacagattataccgtcttagactagataagcatcatttccattgtttcgcgcgggaatgtgctatactagatgcttgtaatcgcaccaagaaccggtgcttgaaagaaggagcataagaaatgaaaaatttaaaagttcaagacctgattgctgtcgggatatatacagctatttattttttattgatgagtttttgtctgctgattttacggtttgttattccaggatttcataatttattcattccagccgttacagcacttttttctggggtcatttatctattgatgttgaataaagtaccaaagtttggcgcgatcaccatcatgggcagtgtggtaggtctcttttttttgatttcaggtcactttccgctagcctttatgccgaatattttatgtgcagtactggcagatacgattcagtataaaagcaagtggaaaggaagtctcaagacaactattagttataccgtattcagctttggtttaatgggtcccatcttgccattgtggttcatgaaaaatgcgtatattgattcgctagttgctcgtggaaaagaccaaagctatattgcaggggtctttgctcatacttccacagcgatgctggtgatttgcgggctcgctgtactggttgcttcgattgtcgggataggcctcggtgctcgtctatatcaaaaacatttccaaccaacgttgcatcaaacaaacgggagatcgatgtgactaggctctcacttgaccccagatgcaaattatttgtgacattctttgcaagtgtcacattgatgatttcattgacgtggacaaaagagttgattgtgatcagctttttgtttatcttgtttctacttagcggtttctggcgaaagggattgttgtttttcgggctgtttctattattgtctttggtagaaggtttttttgcagggcaaaacaattcaatagtaaccaccctgctggatttcttttccgtagggtatcgccgattgttaccgacgatcatggcagccgtatttgcgatgagtgggacgaaaatcagtgaatggttagctgctttgcaaaaaatccgcattccctcgtttttgctggtaccgttggccgtactgtttcgattttttccaacattgttgcaagatgtcaaaagtattcgccaagcgatgcgctttcgcggaattgctttgaacggctggtcctatgtaagacatcctctacagacggtggagtattttttgattcctttattgatgtctgcagaaaatactgccacagaattgtcagcgaccgcgttagtaagaggcctgtcggctaaaaatcctcatacatcggtttatacactgcggttgaaacttgctgattatgtagtgtttggtactgtgttactacttatttttttgtttgtaaggatgtgaaggaatgatcaccatcgaaaaactatctcttaaacggggcacccagcaggtattgaaagatgtctcttgtcagatttttgctggtgaagtcgtcgtgttatgcggccaaagcggtagcggtaagtcaaccttgttgaatgttctcaatggcttgattcctgaactatatccagcagaaatgacgggggctgttcaagtggcaggggattctttgccgacggaagactttcccgcctacgccagaaaaatcggtgttgtttttcaaaatcccaaaacacaattttttacaacagatgtttattctgaactggcgtttacaatggaaaatgcagggatagagccagtagaaatacgaaaacggatcaaagaagcggcagaacaattttctttgtcagaattgttggatgcaagtgttttcgaactgtctggtggcgaaaagcagcgagtagcaatcgcttgtgcaacgatgctttctcatgatctctttttgttcgatgaaccttccagtaatcttgatgaagaagcactacaaaaaattgccgcagcgatccgccttttgaaagagcaagggaagacgatcgtcattgcagagcaccgattgtcctacttgacggggattgcggatcgttacttattactagcagaagggcgcttggtcacagagtataccagtgaagcattgctttctcataccccgcaacagattcacaatctcggattaaggcggatcaacgagccgcagttcgagttggcaatcaacgaaacagagggagcgagtttctcagctgatctgattgcgacgaatctccaagtcacttatcgacgccaacagcaaccagctcttgatattgcgaaacttgttgtgcctacgcgacaagtcgtgggtttgattggcccgaacggtgctggcaaatcgacattgtttcaagtgttcgctggcttaaaaaaatgttcagcagctcaattttggctgcatggtcaaccaatcaatcaaaaacagttattgcgagaaagttttctggttatgcaagatgtgaacctgcagcttttttttgaatctgtcgaaaaagaattgttggcaaaagctgccagaccggaacgttttgaacaagtcgtgactttgttggaactagagcatttactgcgaagacatccacaatctttgtccggtggcgaaaagcagcgagtcgcgatcggcagtgcattgctttcaggtaaacgcttgttgtttttcgatgaaccgactagcggattagacctgaaacaaatggaagaggtcggaaatctgctgcaggaagttgccaaagaagtcgatctgttagccgtgatcagtcatgataaagagtttttggatgaaacctgcccttacgtgatccaactcgaacagggaaagttagttgatacctatcagttagcgacaaatgggggataaaagaaaagcggagtgagcattggttcactccgtttttgtctgaacatgaaaaaatcttcatgatctttttctttcaatccgttaggaagtttttacaaaatccgttatgatagaagcaaaaataggaggagagcagatggccttgagaatcttgatagtggaagacgaagaaagtttagccagttttatccagactgagttgacttttgaggggtacgacacggtatgggccaaagatggccaagaggcattgaccttgttcaatcagcaaactgatctgtttgatctgattttgttggattggatgctgccaatctatgatggcatcacggtggcgcggcgaattcgcaaagaaagcgatattccgattttgatgatgacagccagaaatcaaactgccgatgtcgtgactggtcttgacgttggcctagatgattatttaacgaagccctttgaaatcgaagaactgtttgcccggattcgcgtgattgagcgacggttgcagcgggaagcccaacagcaaaagaaccaacaaaatcagttggtggtaggcgagttgatgatggacatcgccaaacacttggtccaggttgctggagagaccattgaattgactcctaaagagtttggaatcttatatgagttgatgaaagaaccagaagtagtcaaaaccagagatgagctattgaatgagatttgggggtatgaatacgatggtcaaacaaatgtggtagatgtttatattcgcacccttcgcaacaagctggatgtctgcggtaaagggaaaatgatcgcaactgttcggggattaggctatgtgttgaggaccgcccatgaagaataagttcgccaacccacgcagaaaaactgcccagtttcaattaacgagccgcttttctttgattctatttggtctgttgattctcttcaatgtattgtttatcttgttatccgtagggtatttgtttgaacatatcgaaaatcgtgcgtgcaatattcttgaggctatcgaaaacggggaagcttcaggggatgactggaatgatctagtcaatgcctatgtttcggcagatgaagaagatgccttgcaagtgatcttagctgatggcagtgtcattttatcagaagatgcagcagagatttttgccgagatcaatcaaggacggatcatcccatttttggagggcatcgtctttacagatgatggtatctattatacgaaaacccaagaaatcgatagggatcaggtgaagatcgccatcaatggtgaggacagtgtggaattagcctatggtctctttatgatcagcagtttcttgaacctgatcgctgtagtcgttggcagtatattgatttattggagcgttgggaaatggagccggaaattaacagggatggcgcaagaaattgctgaaatcgaacaaagccaaaaaggcgaattgacgattgtcgaagaaccaatcgagattcgttctgtggcgttggctttcaataaactactgaaagaacagcgtgagacgatcgcgcgagaaaaacggtttgttgccgatgcttctcatgagctgcggacacctttagccgcgattcgcggacatgtccaattgatccagcggcgtggaaccaaacacccagaagtcattccttcttcactggcctttatcgataaagaatcgaagcgtttggaaacattgagtaatcaactgctggatttggaaaaaaaccaaacccaagaaataagtctcgttgatgtctcgcagatcgtgcgagaagaatgtgaaaaacaagcaacgatcgttccgcaatcgattgaatattttgtggaaaaccagtgtaggaagcaagggcacaaacgtgacttccaacagatcatccaaaatcttttagaaaatgcagcgaagtattcaccagcagatcagcccattcatgtgagactgacacaagatcaaacgcacttgtctctaaccgttgccgactttggtattgggatccccaatgataagaaagcgttgatttttgagcgtttctatcgagtggaagattctcgttccagtcaaatttccggttcagggatcggattatcactggtaaagcagctggccaacaagtatcatgctgaaattaccgtcacggataatcagccgcaaggcagtgtctttaaaattgatttcccaagtgaaagagaaagatgaagatttttttagattttcttcaagcatttttgattcttttttctgaaggacttgttattctaaatatatagaaaaaaggaatagacaattaattggagaaatgaaacatgaaaaaaacaacaattttgttcggaatcgctgccctaggattattggcaggatgtacacaaaataacactggaaattctgaacctgcacaaaacagcagttcaagctcagcagtcgcatcatcaaatgaaacaacttcttcgcaagctgtggacagatcttcaagcagtgcagccatcgcaaatggcggtttgcctacagtgacagtagaagaagccgtccaagtgttccaaaacaaatatccagatgcagcaatcacatcgcttgacttggatacttcttttggtaagtacttctatcaagttgaaggcgtagacgacacgaatgaatttgaactaaagatcgatgcagaaacaaaagaaacttctgaagaaagaaccgaaaaactagatgcggacgaacaaaacggtgtcaaaaaagaagccgatcaattggatctgaccaacttgctttcattggaagagatttccgatagtgctgtgaaagaagctggcggtggacaagcaacagattgggatcttgataaagaaatgaatgtgacttattgggaagtcaaagttgaagacggcaacaaaaaaacaaatgttaaaatcaatgcgcaaacaggagaaattttagaaactgaacaagatgactagcaaaagcgataagcaataaaaaaagcaaggcagcgaataatgaaacttacgccagtaagcgttctttcgctgtcttgctttttattgatttggctttacttctgtgagaggtttgactcttccgcctatttttgctgcaaaggcttccgactgcttccgatcttcaaaaatccacaacttgtcaggtattttttcacgagtgcgacgaccatctttgccaatgtaaccatgcaagactttaacaacatacattgtcatcatcctcccataaaaattacctttgattatacaaaaaagtgctctaaatgcaattaatctgtctcgagattaatttttcgaggcagccgataatgtcgcataatctgaaaatacttgatggatctcaggaaagctgcgcttcaaatggactaggcgataggtctctttactcaaaaaacaatgtttggaagcgccagttgtgactaactgattgttgtcagttctataaatctcataacgaaaatcaagtcgagtaccggtgtaatgatcgacgagcacatcgatgcgtacttgatcctcataacggatcatttccttgtattgtgcattgacttcaagaacgggaacaatcaaacccgcttcttcgattttatggtatggcaattgtaaaaaggcgagcatatctactcgtgcttcttcgaaccaacggatgtaatttgcatggtgaatgattgccatctgatcggtttcatagtaatgaggttggcggatatagccggaatataaggacatcagggttgctccttttcataactgttttcatcagcataatacaaaacaagagaaatgcaaagtgccttctcttgtttcgggactatttaaattcagcaaacaggtgatcaatcgcttgataatcggttgcggataaatggatatccaatgcctgcgcgttgtcagcaacttgactggcttgttttgcacctggaataactgctgcaactgcaggatttttcatgtaccaagccaacacaagttgaggaatcgttgcatcataagaggcagcgattggtcgcaattggtcgacagccgatacgatttttttaaagcgatcaccttgaaagtccggctttttactacggatatcgtcgtttgaaaaggtcgtttcttgtgtgtactttccagtcaacaacccggatgctagtggaaagtacggaacaaaactgattgaatgttcagctaaataagggaaaagttctgattcagcttggcgatggatcaaactgtactcatcttccacaacatcaacgtacccttcggcattggcttcttttaattgttcaagtgtgaagttggagacaccgatcgcacggattttgccagcttctttcagttgatgcaatgcgcgaatcgcttcttctttaggggtggtttcatctggaaaatgaatataaaatatatccagatagttggtttttaagcgtgttaaagcttcttcaacggcttgggtcaggaattccggcgaattatcttttttgtttggttcttctggtcgatgagctgctttagtggcaatgatgacttgattgcgatcgaacgcttcttcttgcaagacatcaccgatcagttcttctgatcgaccttcaccgtaaatataggcagtatcaatcaaattgatcccattgcgcagcgccgtccgcacaatttccttgccttcttcttcatctaaatttggaaataaattgtggccgccgatggcatttgcacctaagccaagggagcgtacatagacttgtgatttgccgatttgaacatctgtcataaagcaattcctccttctaatctcttcttttagtgtaaaggaaaaacttgaaaaacgatattcataagtattgaaaaagcctatgaaacagcttgacatttccaaaggattcttgtagtttatagataatatcaaaaatctgtgaaagatcgagtacgtcattattggaccttcaaagagaaaactgccatggctgcaagcagtttaggacaaatgtcggaaagacaatctggagatgaacagaagaaaagctgttccgtgaacgagcgttaatcgaaaggagaatgaaagttctcgaattttaggtggtaccgcgtgtaataactcgcccttgtgtagaaaacaagggcgagttttttgctgtgaatcactgcgattgacctgcgaagcagggcagagcagatgatgaacagtagtaggcgaccggagggagagtagtcaccgcttttcgaatcattgcgattgacctgcgaagcagatgatgaacagtagtaggcgaccgaagggagagtagtcaccgctttccgaatcactgcgactggtcgaagactatgcaagtccttcttagcgtaagcttagaagcgacggtaggcgtaacgcagagtagacgagcagatgatgaacagaaaatcgtttcccacaatggatcaaatcagtatagttgtaatgaatacatacgatcgtttttgatcgatcgaagatacccacaataggaggatgaaaacagatgagttatcaacgtccaaaaggcaccaatgatattttaccaggagaatccgaaaaatggcagtttgttgaagaaacagcccgtttggtttttcgtgattaccagtacaatgaaatccgcacaccgatttttgaacattttgaagtgattgctagaagcgttggtgatacaaccgacatcgtttcaaaagaaatgtacgatttctatgacaaaggagagcgccatgtgacattgcgtccggaaggcacagcgccgattgctcgttcttatgttgaaaataaacttttcggacctgaatacaacaagccttacaaagtcttttatattggaccgatgttccgctatgaacggccgcaaaaaggtcgcttacgtcaattccatcaaatcggtgtagaagcatttggttccgcaaatcctgcgacagatgttgaaacgatggcgatggcgatggatttctttaaacaattagggctaagtcaacttcgattagtgattaactctttaggggataaagaaacgcgtaagaactatcgtcaagcactgattgattatttatcgcctcatgaagcagaattaagtgaagattcaaaacgtcgtctgcatgagaatccactgcgggttttagatagtaaagacaaacgagatcaacagttcgttgcggatgctccttcgatcttggactatttaagtccggaagctaaagcccattttgaaacagtcatcacgatgttggatgctttggacattccttatgagattgattcaaatatggtccggggactggattattatacccatactatttttgagattatgagtgaagcgccaaaaatgggggcgcaagctacgatctgtgcgggtggacgctatgaccatctggtcgaagaattaggcggcccacaaacgccaggtttcggttttgcgatgggcttagaacgtctattgatcacaatggaagcagaagaagtcgttattccagcattgaacgaattagatgcttatgttgttggtctaggagaagcaaccaatttggaagcattgaaagtcgttcaggcgatccgtaattttggcttttcggcagatcgtgattttatgaatcggaaagcaaaagcgcagttcaaatcggcagataagcaaggggcgcgtttggtgctgaccctaggtgaaaatgaattagctgaacaagtgatcaacatcaaatcgatggcaagccggatcgagaaacaatttaagttagccgatctgtatgatcattttgatgaaatctatgatgaaatgactacaatcttaatcaagcaaggagaagaagaatgagcaaacgtacagtatattgtgggcgcgtctcagaagcccatttagatcaaaccgttactttaaaaggctgggtccaaaaacgtcgtgacttaggcggagtgattttcattgatttgcgggacagagaagggatcgtgcaagttgtctttaatccggaagtatccaaagaagcatgggcgattgcagatacttgccgcagcgagtatgtgctagaagtgacaggtcaagtcatcaatcgagcaccggaagcaatcaatcctaagatgaaaaccgggcactatgaagtgatggtcagcgagatcactattttgaatacagccaaaacacctgcattttcgatcgaagatgatcaaatcgtaggagacgaaacgcggttgaaatatcgttatttggatttacgccgtcccaaaatgactaagaatatcatgatgcgggcaaaaacgacacaagtgattcgtcatttcttggataccaatgactttctagatatcgaaaccccttatttagcgaaatcaacaccagaaggcgccagagattatctcgttccttcccgggtttaccctggtcatttttatgcattgccacaatcgccacaaattttcaaacaattattgatgggtgctggattcgatcgttactatcaaatcgtccgttgcttccgggatgaagacttgcggggagaccgtcagcctgaatttacccaagtcgatattgaaacaacctttttgacggcggaagagattcaagcttacacggaggaactgttagtcaatgtcatgcgtgaagtcaaagggctagaagtaactacgccgtttccgcgaatgacttacgatgatgccatggcacgttatggcagcgacaagccagatactcggtttgacatggaattgattgatttgtccgaaaccgttaaagatgttgatttcaaagttttccaaatggcgcttgaaaatggcggtgtggtgaaagcattgaatgcgaaaggtgctgcggataaatattcccgaaaagatatggataatttgggacattacgcaggacagtttggtgcgaaagggttagcatgggtcaaagtagaagaagatggcttaaaaggaccaatcgcaaaattcttgactgacgctgcagcatcgatcattgctgctacgaatgcagaagtgggcgatatcctaatgtttggtgcggataagtttgagatcgtttcggcggctttaggagcaatccgcagcaagttaggaaaagaattaggcttgatcgatgaaagcaagttcaatttcttatgggtaacagattggccacaatttgaatacgatgcagaagctggccgctatgtctctgctcaccatccatttacgatgcctaaagaaaaagatgtaccattgttggcaactgatcctgcaaaagtgtatgcggaagcttatgatatcgtcttgaacggttacgagcttggcggtgggtctctccggatccatcagcgggatgttcaagaacaaatgtttgaaacccttggtttttctcgccgtgaaatggaagaacaatttggtttcttgctgacggcattagactatgggtttccaccacatggcggaatcgcactaggcttggatcgtttagtgatgttgctggctggtgaagaaaacatccgtgaagtgatcgcattccctaaaaacgggaaagccgccgatccaatgtcacaagcgccaagtaaagtggcgccgctgcaattgttcgaattgaatattgatgtcacaacagttgaagaagactaagtaaaaagaaatgaacaagtaaagaacaaacgagcgaatgatgaatgaaaatagacgattaagaaaattccatgagaatttgtctatttctttcattgttcgtttctttttttactatctgaagtataataagagcaaatcaacaaagcgaggctcttgaatgaaatgaataccctctttaaatggctgccacaccctgattatgccaacaaattatcgttttcgatcgtctacgccattttatcggcgatcgcagtcaattttttttatcaacccggcaaaatctattctagcgggatcacagggatagctcaaattttgaccaccgtttccacggattggcttggattctatatccccgtctcagtcgccctattgttgctgaatattccgcttttctttctcggctggttcaagattggtcataaatttacgattttcacaggaattactgtagtcctaacatctttgttcgtacagattcttccagaagaaacactgacgacagatccgatgatctgcgggatttttgggggagccatcaacggagccggtattggttatgcgctaaaaagcggactttcctctggcggcctcgattttgtaagtatcgcgatccggaaacgtacggggaaaaccatcgggtccatctcgatttttttcaatattgccatcatgtttgctgcgggcatcctgttcggctggcagtatgcgctatatagtgccattgcgatttttgtcagtggtaaagtcaccgatgctgtttttaccaagcaaaagaaaatgcaggtaacgattattacgagaattcctgaagaagtcatccatacgatccagaaaagtctgcgccgaggaattacgatcatcaatgaagcagaaggagcctacaagcatgataaacagacagtattattgactgtcgttacacgcttcgagttgccgatgttacgttctgccatgaaagaagcagatcccaaggcatttgtcagtattgctgaaaatgtacaaatattgggtcgtttttatgaagaagaattataggagagcttggatcaaagcgtttcgtgatgaaatgcttttttctttttgtaaaaattaatttttttagaaaatagagtattcttgctagctttcttgttgctttatctggtaaattatgaagaaatgggtcattattttttaatggttccacattgactgtttcttacgaaaacagttgatcaaaaaaaagaaaagtggttggagaatgaacaaacggttaaaaacaagccgctatatcactggtttcgacggtatccgtacattagccgtgatcggcgttatcttatatcatttattacctactcaaatgcgaggcgggtatttaggagttcctgttttttttgtagtttctggttatttgatcaccgatttgcttcgacaggagtgggaccagaacggtcgtattgctgtcaaagatttttatgtccgccggatgaaacgactgtatcctggcatggtggtgatgctgcttctgtctgctgcctatattacattgttccagcggaatttactgaataatctgcggggagtcgtcgtcagcagtctcttgtatgtcaacaactggtggcagatcaatcacggtctttcttattttgaccgattcggcaatgaatctccctttacgcatctatggtctttggctgttgaagggcagaattatttgatttggccgttactctttattttattgatgaagttagtcaaaaatcgtgggacgatttttaaaatcgtgatcggctgctcgttactttcggctcttttattagcgatctggtattcaccaggggcagaccctactcgagtttattatggtaccgacacgcgtttgttttcgatttggatgggaagtgcgctggctttcatttggcccagcacccatttaaaaaaagaaattccgaagaaagcgaagcgggtattgaacctagctggtggtctttcttttattggtttagtgataacattttttgtgctagatgatcatctttcctttgtttattacggaggaatgctgctagtcagcttgctttgtacgatcttggtggcggtcactgcccatcctggagctagtctgaaccgttggctgacaaatccgttattcagttacatcggcaagcggagctatgggatttatttgtatcagttccctgtgatgattttttatgaagcaaagattgggaatgtcggcgagaatgttctcctgcatacattgattgagattgtattgattctcttgatcagtgaattgtcctatcggtttatcgaaaatccgttgcggaaattccactacaaagatactttccgcacggtgcgcaattggttcagtaagccagtgatcagtcgacaaaagccttggctgcttccaggactgcttgtttccttagttgctctttatggaatagctaccgctccggtgaattatgtagatgcgcaacagcagcagttaaaagaaaatattgctgccaataaaaaagcggcagaacagacacaaaaaaatgcgaatggctcggatacagaaagtacaggagaaaattcttcaaaggcaacggaagccgaacaatcagtaatggaaaaatatgggttgacagaagcccaggtgaagaaggccgaagagctggaaattaccgcttttggtgattctgttatgctggatgccactgccgacttgcaagaaatttttcccaaagctgtcgttgatggggatgtgggacgacaattgtatgagagtccggaactgatcaaagcattgaaagaaaaagatttgttacgagatacggtattgatcggtctaggaacgaatgggtcctttacagaaacccaattcgataatttgatgaaagaaattggcgatcgcaaagtctattggatcaatgtgcgggtacctacgcaaagatggcaaaatgaggtcaacagcatgctggagaaaatggttgctaaatacgacaatatgacattgatcgattggtatgatttaagtaatgaacatgaagagtggttctatgaagatcgagttcatccaaatcctgatggcatgttgcaatattgtacactagtttctcaagctattttgcaataatggcgttgactatttcttagaaaaataaactaaccgagaggtctcaagcacagattcttgtttatcttcaagaatcgcaagagatctctcggttttttgtatcgcctttcctaagtggaatgaggatctttatccaatcgttgcaacaagcgtttcaaacaacaatgcactggaagcggcacctggatcgatatgtccgattgcccgctcgcctaaataagaagcacggccttttttggcgactaggtcttttgtatgttctttggcttcctcgatttgttctttagtcagactgccgttttttaacgctgcggcaacaggttgccagacatcgaccatcgttttgtcttcgaattctgctttgcctcgagctttgatcccattaagcccttcttcgatgatgcttcctaattgttcatacgaatcaattgtttccagttcttttgtagctttggtcatgttcatgaatgctgagccataaagtggacctgaagcaccaccaactttagaaatcaatgccatcgagagtactttgaatgtgtctgtgattgttttaggctgttgttttgcaaatgcttcttgataggctgcgacgccgcgagccatattgttgccgtgatcgccgtcaccaataggggtatctagatcacttaaatagcctttattttcctcaatggcttttgtaaatgcatttaaccattgttgggtcatctctgttgtcatttgcattgaaaattcctcctttaccaagcaatcgtttcaacaggttcgttgagcgcatccgtcgcatcgttgttactgaaatcgatcatggtcaatgatagaccttgcatatcgatagaagtcatatagttgccgactttatggaatgtgacagaaatgtctttgtctgcgagcaatttctgtacatcgttggcaaagacgaactgttccatcagcggtgtaccgcccatgccgttgatcaagacaccaacttttttcggtgtttgttcataatcagctaaaattttgtccaccaattccttggctagctctttcgatggtttcaatttttcccggcgataaccaggttctccgtggatccccacgccatactcgatttcatcatctgctaattcaaaaccaggtttacccacttctggaacggttgctgcttttaaggcaacaccaatggttttgatggtcggaactaatgcttcacctaattcttttaattcagttaatgaacgtccttgacgagcagcagcacccaaaattttatgaacgagaatggttccagccacgcctcgttttccagcagtataggtactgttctcgacggcaatatcatcatctacgacgacgatttcagcagtgatgtcttccatctcagccatatctttggccatttcaaagtttaggatatctcccgtatagtttttaacgatcaaaagcacgccttgcccttgatcggcttctttgatcccagtcaggatctgatctggtgttggagaagtgaagacgtctcctaagacggcggcactcaacataccatcaccaacaaacccagcgtgtgccggttcgtgtccgctgcctccgcctgagactaagccaacttgtttgtgggtggcgttttttgctacgactcgggagtcttcgacttgatgaatcagttgcggatagctggcaaccagaccagctagcatttcttcgacgatcgctgaaggatcattgattatttttttcattattgattccatcctttctcagctgctttttgggcttctgctgtgatctgggataggtcatcactgaatccagcggtgattgctgcggcaaaagcaccttctacaagcggtgcatcaatcaagtgatagcgggtttgctgttccggttccaacatatcataggctagctctgcgtttagtacggcactacccaaatcagcaaaaacgagaatctgttcggcatccggagactgattgaccgcttcaacgatttttgtcggatcagaccctaattcgccttcagctgttccacccaatgaaaaaagagtgactgtttcgctgtccgacatgtcttcgatcatggctttcagtccgtctgtcagttgttgactgtgagaaacaagtaaaatacttttcttcatttcgattcaccaacgctttcttaaatagattcagcggcagtagacgaaaccgccttcactaaaagtataacaaatttcgcaaaacttgcatggatgacgattgagagggggcaaaacaaacaacaagctaaatttgtttttaacgatcaacaacaactcgtgaaagaggaattgagcaacggtaagaagatcaatcgattaaatagttgtttataaatagaaaattactcctatgcatcttttctttttgcctaaattttatagggatttaaaaaaagtacttgcatttgagtttgttaccgattacaatccaagtgtaatcattattttgttattcaatgtacaaaaaaatgtatattgggaatggaggatttctatgaaaaaaattgttattggcggtcagattgataaaaatgaagtgaaggacttggtagaaaaatttagtgaggggcaatttgaaattgacattaaaagtgacttagatgcggctatggcagtaaagtctgggcaggcagattattatgtaggtgcttgtaatactggtggaggcggggcattagcaatggctttagcactattaggaagagaaaattgtgtaactgtttcaatgccgggaaatgtaatgcctgaagcagaaatccgtgagaatgtacaattaggtaaaactgcctttggctttacagctcagcataaagaaacggttataccgatcatcatggatgagttgaaaaaaactataatctagcggaggaaagaagatggattcatcaaaaattattgagttagttgcaatcgcgttgttaggtggaatatgtgcagtgttggcaaataaaggtatcgcagtatttaacgatggattacgaccaattgttcctgaatttttagaaggaaagattgggaaaaaagaaattgctgctacgagctttgcattgagttttggtctagttattggttttggtattccagtatccatcggggcatctattttactggttcatagtgttttattaatgacggatatcatcggatcctgggcgccagaaggcaagtctggtatcatcatttcggcaattataggcgctatgtatggaattggtcttgttctaggattgcaggcggtagttgatttatttgcaatgatgcccgtgaatttcatggattctttgtctatggtagggacaccagttgttatttcttttagcatttttccagctgtcgcaattgctagtcagcatggatttaaaaaaggagctatttcttttgcagccacattattaactttatttgcagtgaagcgctttggtacgtttgatttaggtaatggaacttccttaacactgagtgcggagggaatgtcattactggttggtatgattttcatgattgtgtacgccattcaggtcaaaagtgatggaagcaactcaaatgaaagtcttgtcagtgtttttttagaacgtgttaaccgtattaaaaaaaattgggcatggttagcagtgaccggtggcttagtctcagcagcaactagtttaatgattattgccggagatccaatttctttaaatttactttcggaaggaaaatttagtgaggctggattagctgccttcgctcgaggcattggatttattccgttggtgttttcaactgcaatcgtaacgggagtttatagtccagctggtacgacctttgtatttgtagctggtattttattgcatgataatccaataatggcttttatcgtaggttcagctttaatgtttattgaagtacaattgttgagtttgatggcaaaagccctggataagtttccgggtattcgtgaaatgggtgagcatattcgaacggcaatgaataaggttttagaagtagcactactgattgggggcgctatggcatctgaacaaattgcgccgggaatcggttatttctgggtcattggtttaatgttattgaatagaaaagcgaagaaaccagtggttgaattggctgttggtccaattgcggcaattagtttaggtgtaattgtaaacatcctttatctggttggattatttgcaccagttgtagcgaactaggaggtagctgtacatgattcttgaaggtatcacatatatgcatgaacacacaacgattgatttatctcgattaaaaaagagtgatgatacaaatttaaattgctttgatgaaactgtttcagaatacaaaaatttgtacgataaaggtgttcgaaatatcgttgatgtaacgaatcttgatatgcgaagaaatcctttatatgttcaaaaagtggctgaacaaactggaataaatattattcaggcaacaggtttttatcaggataaatttttacctagctttgtgacagaagcatcgattgatcaattgtcctcattaatgatcaaagaaatcgaagaaggaattgcggaaacaacgatcaaagcagggattataggggaaatcggtacgagcaaggacaggatgacagatcgagaacgaaaaatatttaccgctgctgtcattgcccaacaacagactaagatcccgattacgacacatacaacattaggcacatacgggcatgagcaggtagcttttttcaaggaacaacaggcggatttgtcaaaaatagttatcggccatgttgatctaagtggcagcacagactatattctaaaaatgctagacgaaggtgtttatgttgaatttgatacgatcggaaaagaaaactatcagccagatttattaagaattgaaatgctgaaagaaatagagaaacgtggctatcaagataaagtcttcctttcaatggatatcacgcgtaaatcaaatctgtcttatcaaggtggtatagggtattcttatcttttggatacctttgttccgatggctttagaaaatggtgtttctcagacatttattgaccgaatgctacgaataaatcccaaaaaatttatggatgattaggagatattgatcatgaaagcttatcctttaaccagtctaacggtgacagaagcacaacaattacaatttaagcttgttgatgccattacacgaattgtacctggggatgaactattaacaagaggggatcttggtgtagtaaaaggactaaatcaaccaaaaactacctaccagattgagcaagtattggctaatttttttgaatcagaacaagctatgctcgttcgcggatctggtacaaatgctattcgactagccctccatgctgcagtaggaactggtaaaacgttgttagtgcatgatgcccccatttatcctactacgaaagtttcaattgagatgttgggaatccagacaattcatgctgactttaatgatcagacgagtgtgacacaggccttaaatgaaaggcaagttgatggagttctaatccaagtcacgaggcaaaaaatttcagattcatatgacttagcacaactgattgccactattcgtagggtgaatccactaattccaattattacagatgataattatgcggctttaaagacaaaagctataggttctcaattaggtggcaccttagcctgtttttcaacatttaaattgcttggtccggaaggtattggatgcattgttggtgagaaagaatacattagtaaattacgagaagaaaattattctggtggtggacaggtacaagggcatgaggcattggatgtagttaaaggaatgatttatgcaccagtagctttagcaatctccgctgaggtaagtgaagcagtttgtagaagaatcaacgaaggcgaaatcgcagaatttaaaaaagcctatattgtcaatgcgcaatctaaagttgttgtagtaaaattaaaggaaccaatagcacaggcgattattacagaagcaaccaagttaggggctttgcctcatccagtcggtgcagagtcacaatacgagtttgcacctttagtttatcgcgtttcgggtaccttcaagcaatctgatccagaagctgagacaacaatgatccgaataaacccgaatcgatctggcacggataccattatgcgtatcttgcaagcatctgtaaaacgagcctcaagataaggagaaatcatgggggaagagtttttaaagaaaaaaggaattgtcattaactttctagcatccgatcttttacaattaaaaaaaggggatcgtgtacctagtgttagcgaatatcagactcgcttcgatgttgcgagagggacgatccaaaatgcgctaacctttttaaaagagataaaggcagttcaattaaaaagtcatgggcatttaggaacctttattgaagccattgattatggagtattacaagaatacgctttatcggatacgattttaggaacaatgacgttaccctattcacgattgtatgaagggctagcaacaggaatttacgaagtctttaaagagaataatatcaaacttaatatggcatacattcgaggttccaaagaaagaatccgctcaattacaaataaaacgtatcgttttgcagttgtttcagcatttgctgctcaacgagcaattaaacaaggagagcctttagaaatagttgttaattttgggacacagacatatttaagcgagcacgtcttgttgtttaaagaagagggacaaactgttcttacatcaggtatgagaattgccatcgactacagctcattagatcaacaggcactaacaaaggaaataattggtgacttacctgtagaatttattgagatgcaaggacatcaaatcatctctgcgcttaaggatgatcacattgatgctgggatatggaactttgatgaaattagggataaaaatcagcaagggttacagtatgtgtccttaaaagaaaatcagttagaaaaagcgatggggacttcggtaatcattacgcatattgaagatgtttcaatgaaagccttcctacaaaaaagcatcaataaagagaaagtactgcaaattcaacaagcagtttgccaaggacaattaattccgcaatattagtaagggggcttattcatgataagagataaattaactgttttattagattcggggattgttgatcaggaaacgtacgattatgtatttaacgttttatcctatttattagaaaaagaaattgttgaagaagagcaacaagctgatgtttttttgacccacttagcgatggcagatatgcgaagaaaaaataatgaaactgtcaacagcttagagtctttcatccaagcagagattgaaggtgatccgcattatcttcattctagagaattgtggcaagacttacaaaaaatgacaagtgaacagtcattcgcggatgcggagttagattatttttatctgcatatcattaatatgttaagggaggagtaatatgttcttagatgtaacgatgcgcaaaaatccgcagttagtagaagccggattaagattgcatcaaacaggacaaattcttccagatacgtatgtgctagatcttgatgctatcgaaaacaatactcggcttttagtggaaagcgctacaaaaaatcaaatcgaactgttctttatgacaaaacagtttgggcgaaacccttatgtcgcacagaaaattcatgaggcaggtattaaaaaagttgtggtggtggattacaaggaagctttagtgatgatgaaacaaggcttgcctttagggaatgtcggtcatcttgtgcaaattcccaaacacttgctaaagaaaattatggattatggtacagactatatcactgttttttcaactgaaatgatcaataatatcgcgactgttgccagggagttaggaatccagcaaaaaatactactcaaagtgattgaaccaggcgacgaaatttatgagggacaatttggaggatttcatctaaatgaattaacgaaggtcattgaaatagtaaaacaggaaggaattatcgttggggggattacttcctttccttgttttctttttgatggcgtttctgagttacaaccaacgcacaatgttgaaacaattaagaaagcaataaccattcttaaacaggctggtttcgcaataaaagaagtaaatatgccttctgctacttgtagtcgaacaattccttttatccatgagttaggagggacacaaggggaaccggggcatgctttaacagggacgacccccttacatgctcaactagaattgccagaaaaaccagcaatattgtatgtcagcgagatttctcataacttagatggtcacggttatttttatgggggcggttattatcggcgagggcatttagaaagcgtaatgatttctactgacgaccagaagctagcaaaagatgaagttataccttttggtaatgatagtattgattattatctttcaactaaactcacacatgaagttggtgcaacagtacttgcggcatttcgcactcaaatatttgttactagaagtgatgttgctgtagtgtcagggattcaaactggacaacctagaattgaaggaatatatgacagtcttggaaaacaaattagaaggtgagaatatggggagatttgtcgttattgtattagatagttttggtgttggtgctatgaatgatgtacaggaggtacggccacgtgatattggcagtacgacagctggacatattattcgagacataccgaatattcaaataccaaccttggaaaaattaggcttaatgaatgctttaggggaggaaattggacgtcatcatttttctaaaacagcaaattatggaacgagtaatttggctcactatggtgcggattcttttttaggacatcaggaaattatgggaacgacaccaaaaatccctttgattcagccattcaaccaaaagattgatgtagtggaagagaatttagtgaaacaagggtatcaagtgcggcgagttggtgagaaagggactcaaatcttagtggtcaacgaggtggcaacagtcggcgataacttggaaactgattatggacaagtctataatgtatcggcttgtctggatttagttgattttactaacttaaaaaaaataggacaagcggttagagacgttgttcaagtctctcgtgtgatcacttttggtggagaacagattgttttagatgacttattatcagccaaaaaagtgaaaaatgatgagattgctggagtggatgctcctgaatcaggtgtttacaatcatggctatcaagtcgttcacttggggtatgggattgacaaaaatgtccaaacaccgaccatcttggataaagcaggaatcacggtatctttcctaggaaaaattgctgatattattcaaacggaaagtcatcgactatttcccggggttgattctgaaggattgtttgataatttgatgagtgaagtaaaaacaattgatcacggatttattgctttgaatattcaagaaaccgatttagcggggcatgcggaggatactgagaagtatgcagatcgtttggaagtaagtgatcgtagaattggcgaattgttacttgagatgcgagaaggagatctattgattgtgatggctgatcatggcaatgacccaacgattggacacagcaatcatactcgtgagcgcgtcccgctattaatttatagcccgggggtgcaagggaaaaaaattggtgagcggctgaccttagcggatgtaggagcaacggttgctgactattttaaggtggcagcaccacaaaatggtgactcctttttaaaagaaatttttgattgataaaaaagacttgggtgcttgttttcataaaaagctatgccaagtcttttttaggaaggaggtataaggatgcatgaaagggtacaaaagtatgcgctaaaaactagtttgggcatgttaaatccaagtggttcagtagtaactgtttatcccaatgcgatcaagcagatcaatacactcaatgactattatctaggagtgaagcaagtatcatttatgttgactgactttttaacgtttttatcaagcaacggatttcatcaacacacattagacaaagcaagttttagcggcagagggattgatcttgatttgaagaaccccattactggtcgctttatgtcaggatcatctagtggcacagcattgaatgtttttctaggaatcaacgatgttggattgggcactgatgggggcggatccgttctagctcctgcgtctgccttaagtttggtaggatttatccatcctgatcttggaaatcaatttgttgatctatctgtaaatagaaaaacatcaacggataatatttcatttacaccctcgctagggtttattagtaaaaagctctcactgattgaacagctttgtcacctttgcttaccccaaatgtttaagcagacacctaaaagaagggtagtggtcgataatagaattgacgtgaagatgcgccaagaactttctaatatttctaccatcgaatgcatgtacaaaacctttgaagatgcaacgaccttttctcgagaaacattgattcaacagttacaggcaatgctcattgatttcgatgtgattgttgtcaaagaaggacccattgacttgtttggcatcggggatactgttttcggtcattttgatgaacggacaatgggaatacaacagcaagcaggaaaagggtacattcgggttgtgaatatgtgtcaagcagtagggttagttgttccaagcagtgaattagcgactagctatctattgatttgtaaaaaagagaataatcttgagcctctatttaccttagccaaagcactcctatgcaaaatggatcccttgattgagacctattttgctgatagtcaaaagtattttgaacatggatatcaaagttgaagaactgaaattgctagtcgccttttctactaaggaaagacagaaagttaataaagattttatgagcggaaacaacaaaaatccgaacaaccgttgataagtatcttaatcaggagaagggatcatcgttgttcggatttattttattgaaaggatcaagccgtagcgttttgctctagccggcgggtgatctgtgttgcaagggcagatagcccccactgcaataagcagttgatcgccatcaatccaacaaagattggcaaggtgatgctagtcaaaaagcctacttctaaaatgtgatggaagagcattgcggcgatgtatgttccgctaatcgtggttacgatcaaaaataagcgcaatggatttagcggcaaacagctgcggatcacagctaaacaactgatgccgatcagcagataatagaacaatgtagttgcggtcattggttcccagccatagtcagtttgcaggaactgtacagcgaaataattcagaagcaccaagagtgcgctcggcaacgctcgcagcaatgcggtaggcaagtaacggccggtgattcgctttttgtcttcttcaaaggaaaggaagaaggaaggatatccttcaattgctaggtccaataatgtgatttggatcggaataaaaggaaatgccgtagaagtggcaacacatagtaaggacaataggaaactgtagatcgttttgataaaaaagatcccagatactttcgtcacattattaacgacacggcgaccttcaaagagtgctgctggcagtgtcgtaaaatcggaatctaataaaaccagattcgcgatttgacgagccgcactgtccccagcagccatagcgatactgacatcggcttcacgcagtgccaacacgtcattgacgccgtctccagtcatggcgaccgtattgcctagtgccttcaactcagaaactagcagtttcttttgctgaggcgtcactcgcccaaaaacggtataggtttgggcagcttgacgaacgtctgcttcttcagttagttgggaaagatcgatatagttctctgaattaggcaatccggcgcgtttggcgatggctgcaacagtgatcggattgtcacccgagatcactttcaagtccactccttctgcagacaggtaggccaatgtgctttctgcattttcccgaatcacatcagcaagaacaagaactgccagcggggcagcctttgctggatcaaagggctgattggcgtcgttataatgaggatcaagagtcaagacgaggactcttaaaccagccgattgcgcttcttgaatttgcggcagctgttggttggcgatcgtcttttcaggtgctcctagatagactgcccctaattcgtgaaatgcgatagcaccccattttcgatcagaagaaaacggcatcgctgcaaaggactggtaatgatcagatccggtgatggtttggcgcaacgcttgcatcgtcacattgttgtcggtactggcagccaaataactacctaagattgccgttatatcttgggtgtcatcgattggctggatcgattcgacggataatcgaccttccgttaatgtgccggttttgtctaaacagagggtatcgacatgggccagtgtctcgatcgcgtacatatcttggactaagatcctttttttggctagtttgatgacacccgtggtcaaagcaatgctgatcaataggacgagtcctttaggcagcattcccaataaagcagcagacgaaacgatcactgcttcttttaagtcactaccacgaaataaataagcttgtagaaataggatcacccctaatggaacaatcactagactggtgaattttgtgactttgcgaatcgaagaaactagctctgaacgcagcggtttatgtgttttggcttcattgcttaattttgccgcataattctctgctcctacgcggatcacttttgcagtgacctctccactggcgacaaaactgccagataagagagtcgcgtcgttttctttgacgacgagatcggcttcgcctgtcagcatcgactcattgacatcggcttgtccagataaaaccaccatgtcggctggaatctgttctcctgcaccaatgacaacaagatcatcaaggaccagggatttggcatccaccgactgtgtaacgccatctcgtatcacacgtatttcttgttgggcgatgatcgagagttttttgactagatttcgagcatggatctcttgactgatccctacagtgatattgatcaaaatgattaccagataaaataaattggaataggcgccaactgccagaagacagacaccaatcaacaagttcagcaaattgaacaatgtgaggatattgtccttaaaaattgctgtcgtagacttcgatgtttttgtttcataatcgttgtgttggtcttgttcggttcgttgtgtgacttcttctgaggtaagtcccgtatctatttgcttcatataattctccatttctatcagattccttgtttagtctagcatgccaagaagtcattgcaagaaatgatgaaaaaataattgaaatcttaaaaaacagtagcggtttgttcgaaagaaggggcttttcattgacttgttcccagaaacttgatatagtcataatgctcaaatagtaatgatttcgatttgttgtttttgaatcgaaaatggaggactctgctagctgatttcttttctttttagaatgatggatagaaaaaacaaaggagaaaataatggccaaaaaatcaaaacaagcaaaagcaaaaaaacaagccgcaatgatcgagcaatacgcagagatccgttaccaattgaaacaagcaaaagattaccaagctttagcaaaattgcctaaagattctaatccgaatcgcttgaagaatcgggatatgactgatggtcgtccacggggctatatgcgtaaatttggtctttcacggatcacttttcgacaattggcacatgaaggcaaattgccaggtgtaaaaaaagctagttggtaaacatttaataggtgtaacaaaaataatacaatcaaacgatctcccttctagatagctcagaaatgcgctgtatggaggggtattcaaggaaaactatctgaatgctgaggcagctgatctcctaaaaagactgggagatagacgccgagcgtttaggtagttttttgtttgaattttttgagggcagcgattcgactaatcggaagtggtctcgtataatagaaaaagcaaagacgaaggtctgatgaacacatgttggataggagtatatcatgtctttaaaagagaaaatcatcgcagaaagcaagcgtttaggtattgataaaatcggctttgcttctgctgaaccgttttatgaattagagtcctcgttgagggagcagcgcgcgaaaggccatacatctggtttcgaacatcaagtgatcgaagagcggatatatccagaaagaacctttgaaaatccgcaaacaatcattgcgatcgctctggcatatccgacaaaaatcaaagagaaagtgccgcgagatgagaaacgggggatgtttgcccgcgcctcttgggggatcgattaccatgatattttacgtgatcgcttagaaaaattgatccagtttatcaaagcgcaagcagagaatctggaagaagcagaaagctggcggtttgccccgcaagtggataccggtgagctggtggatgtggcagttgcacagcgtgctggtttggggtttattggccgcaatggcttattgatcacggaagaatttggttcttttgtttatttaggcgagatcgtcaccaatatttccttcgaaacagatgaagcggtaccctttggctgtggggattgtatgcgctgtgttactgcctgtcctacaaaagcgctcttaggggatgggcgaatgaacgcacagcgctgcctttcctatcagacacaaacaaaaggcatgatgcctgaggaatatcgtaaaaagatgcataatgtcatctatggctgtgatatttgtcagttggtctgtccctacaatcgaggcaaggatttccattttcatcaggaaatggaaccggaagtagaaaccgtttatcctaagttgcagccaatgctttctttatcaaataaagcttttaagaatcagtttgggcatttatctggttcttggcgcgggaagaaaccattgcagcgtaatgcgatcattgccttagcaaatctgggagatcgcaccgcattgccagccatctggcggtgtgcgacagaagacgtccgacctgtcatccgtggaacagcctattgggccattggacaattaggcatcaaagaacccgaacaatggctagaacgcttacagcaatgcgaagaactagaaccagaagaagaagcacgcgttgaactacaagcggcgatcgaacgcttaaaaacgatcgtggcatcctccggtgcagatcggaaaaacaagtcagttgattgattgcgtgctaggcggaactccataagcacgtgagcaatcgtacaaaaaattaaagcacgcgattttttataataaagagccgagcaatgtttagaatacgtcaactatgccgcaaatgcgacatgacctgaaaagtctggaagtattccgacattgctcggctattggtcgaatggatgctatttttaggggaagatttttcacagtagtctattttttcagcttaatccagcacatcatcgctttcaacgatttcttctgagtctaattcaaagtctggtgctggatggacacgttccggtaattccatctctagttcagctgtttgttggtattcgttgtcgctatcagcaacgtcaatcaatatatccgttggcagttcttgatcgattcgatagccttgtgcatggcgcgcatcgagtagttctaagaggtgctgccattcatctttggcaatcaccacgacatcgattccttcttgattttgaatttcgacaacagaagatagatcagtcccaacagtctgaatgatttcttctaatgaccattttacgttttctaatgaaattttttgtgccatttggatacccctttcttgtcaattgactctcatttcattgtagcgggaatttggttgattgcaaaatagtatgatcgcaggtctatgaaaggggttaaaaaaatgagaagaagaattgaagtcttttgtgaacaaaggtaatatggtattaaaagaaatgagggagtaaagatgaaagaaaaacaaacgtttcatgttaacggttacttagcactgatcgtcttgatcgccttaatgatcggcggcggctatctcttttatgatgggattgtccgcaatgcggtttgggagttagtcatcagtgtcgtgttgtggatcatcgctatcttgttcattagttcattgacgattgtgcagccgaatcaagcgaaagcgattcttttctttggtcaatatttaggtaccattaaagacaatggactctttgtgactgtgccgctaacacagaaaatcaatgtatcactgaaagtccgtaacttcaatagctctttattgaaggtcaatgattctgatggcaatccgatcgaaatctcagcagtcgtcgtctttcgagtcgtagatacggccaaagcattgttcgatgtcgattactaccaagattttgttgagatccaaagtgaaacagcgattcgccatatcgctacccagtatccttatgacacttttaatgatgatgatttgactttgcgaggcaataccaatgaagtttctgaagaactggcacaagaactgcaagagcgtttagcggtagccggtgtcgaggtgatcgagacgcggttgaatcacttggcgtatgccactgagatcgctagtgccatgttgcagcgtcagcaagccaaagcaattttatcggcacgacaaatcattgttgaaggagcggtctccatgacacaaatggccttggaacagatcgaagatggccaggatattaactttactgacgatcgaaaagtccaattgatcaacaatttactcgtatcgatcattactgacaaaggcactcaacctgtgatcaatacaggcgatgtgaaagaaaaggcggtgtaatcaaatgaaaaaactttacatcaagcaaaaagtcttcagtatcggtgaaaaatttactgtcatggatgagcagcaaaagccgcgctattttgtcgaagggagtttcatgaagattcctaaaagctttgcgatttatgatgaacgacaacagcaaatcggtgaagtcacaaagaaagtgtttagtctattgcccaagttttttgttgaggtacatggagaagaagcaattgttctagaaaaagaattcacgcttttcaaagcgcgttattccatccatgcccaaggaattgaaattcaggggaattggtgggacatggactttgtcgtcaatcgacagggacgtcaaattgctgagattcataaacgatggatctcatggggggatacctatgaagtaacggtttatgaggaagatctggaggacttgattatttgtctcgtcattgccatcgatcgcgtaaaagccgatgatggtgcagctgcgagttctgccagtacttaaacagaaaatgaaagcaacgatggaaaaggagacgaaaagatgtacggatcgatagaagcaggcggtacaaaatttgtttgtgcgattggtgatgaagaaatgaccattaaagaacgggtcagttttcccaccaccacaccagaagaaacaatggcattagtgatcgattttttcaaaaagtatgaagaccagttagtggggatcggtattggttcctttggcccaatcgatatccatcgagattccgcaacgtatggctacattacctccacacccaaattagcttggcagaattttgattttgtaggtacgatgaaacaagcctttcccatccccattgcttggaccacagatgtcaatgctgcagcttatggggaatatgttttcggtaaaggaaaaggactatccagtgtagtttattatacgatcggcaccggtgttggcggcggtgcattacaagatggccgctttgttgagggattcagccatccggagatgggacatatgctggtagtgcctcatcctgatgattcattcgaaggcagctgtccatttcatggcaactgtctcgaagggatggccgcaggtccagcgattgaaaaacgcttaggaaagaaaggacaggaactgtctgaagatgagcctttctggagcatcgaagctgaatatatcgcgcaatgcgcctacaacactacattgatgctttcaccggatgtcattatttttggtggtggcgtaatgaagcagcgtcacatggtggaaaaggttcatcaagcttttgaacgattggtcaacggctatgtcaaaacaccagcagttgcagactacatcgtgacacctgaattagaagacaatgcaggaacattaggctgtctggcactagcacgagaagctgtgttacattcctgatacatgtgatcacaccaaaacattggtgtgatttttttgtgattgaagggattatttggcaggtaagagcagaatgcgtatacttaagcagaggtggaaagagatgaaaattgcagttcgtaaaagaaaaatcgggaatatcccagtattggaagtcgttccagaacatttgatctatgaaccgttgccgttgatcatttattatcatggttggcaaacgagtaaagaattggtactgacgcaaggtcgaaaactagcacgggaaaactttcgtgtgattttacctgatgccgccaatcatggcgaacgaaagacccaactatccgagattccttcattgattttctggcaaagcattcataccaacttatttgagttttcttatttggtggatttctttgaaaatctaggcttggtaaataggcaaatcgctgtaggaggcgtttcaatgggagggatgacgacttgcggcttgctatcccaacatccggagatcaccgctgctgcgtgtgtgatgggctcgccatcgatgatcggttaccgtgaacggatccagaaacatgcgggtgctgcaggtttctttgtcccagatgactatcagttgctactgggatggatcgaagcttatgatctccagacgcaaccagaaaaactagctggacgtccattgttgttctggcatgggacggaagatgagaaaatcccttacgccgatgtagaaacctttgtgcaagggaatccagaagcgaatctgacatttatctctcgcgaagaacgacatttagttcgtggagagaccatggatcaggtaacggccttttttgttgaacaattaggaaaaagcactgattcactctgacaacaaaaaacgacaggtatctaggtaagcaaagggattgtgtggttatgtacaagcataaaattcgtgttcttcatttttcttttttatactgtagggtggaaaaaaggaggaatgactgtgaactatcgcgttttattattttataaatacacgaccatcgaagatccagaaagttttgcgaaagagcatttagcttttgggaaagagatcggtatcaaaggtcgaattcttgttgcgaaagaaggaatcaacggaacgctttctggaacgattgaagcaacggatgcctatatggaaaaaatggaagcggacccccgtttcaaaggaatctactacaaaatcgatgaggtggaagaacacgcctttaaaaaattgtttgttcgaccgcgaaaagaattggtgtcattgaacttagaagatgatatcgatcctttagaactaaccggaaagtatctagaaccgaaagatttcaaagaagcgttgttggatgaaaataccgtagtgatcgatgcgcggaatgattatgaatacgatcttggtcattttcgaggtgcggtccgtcccgatatccgcagtttccgtgaattgcctcaatggatcattgagaacaaagagaaattcatggataaaaaagtggtcacttactgcacaggtgggattcgctgcgagaaattctcgggctggttgttgcgagaaggattccaagacgtagcacaacttcacgggggaatttttgcttatggcaatgatccagaagttcaaggagagttgtgggacggtaagatgtatgtctttgatgaacgtatcagtgttgagatcaatcatgtcgacaagaccgtgatcggtcgcgattggttcgatggcacaccatgtgagcgttacgtcaattgtgcaaatccagagtgcaatcgtcagttcctcacttcggaagagaatcaagcggcacacttaggcggctgctgctatgaatgtgccgccaatgaaaacaatcgttacgtcattgagcacaatatctctcaagaagaacaagcagcagttttagcacaactagcgtctgaagtgacggtttaaaaagatcctgaaaaggatctttttttgttctttaattatctgaaaaatcaaacgattccaattgatttttttaacaaatttcactttaaaaaaggcaagctcctcgcatatttgtttgatttggagtaaactatacctaattgtcagataggaaagaggaatagagatgaaaattgttattgctggtgctggtgccatgggcagccgatttgccattaaattaaaaagaggcggcaacgatgtaacgttgatcgatggttggccagcgcatatcgaagcgatccgtaccaatggactacaagcaaatttggatggagaagaaatcacagaatctttccccatttatccacagtccgaagtaacggcggatacgccagcggatctgatcattgtttttacaaaagcgatgcaattagaccaaatgatgcaagacattgcttcactaatcggtgatcaaacaagagtactttgcttacttaatggcattggacatgaagatacaattgaaaaatatgtcgctaccgataaaattttcttaggaaataccctatggacagcagatttgattggacctgggcaagttcgattgtttggggaaggatcggttgaactgcaaaacattggtgaaggcaaagaagcagcggccaaagaactggctgaggtactaactgcttctggattgaatgcgtcatactctgaaaatattcgctattcaatctatcgtaaagcctgtgtcaatggtacattgaatggtttatgttcaattttggatgtcaacattgcacagtttggaaatacagccactgcacgacaaatggtgcaaaccattgttggagaattcgcagctgttgcggctcatgaatcggtagaactagatgttccagaagtcgttgcccatattgaaaaaacctatgatcctgcaggtattggcttacactatccttccatgtatcaagatttgatcaataatcatcgtaaaacggagatcgattacatcaacggggctatttcgcgtaaaggtcgaaaatacaatgttcccacgccttattgcgacttcttgacccaattgatccatgccaaagaagatgtgcttgaagcgaagtagtagtaaaaataaaaaactatgatataagtctaataataaaagatccgaatcatctatgtaatgccctggtagtttaggagaacatcgtcacacattttggacgttcaggagcaatcaaacatttatggtccggatccttttttttgttcatatcgtagtgactttaattcaattgacgataaagaatttttcctgctattgcttattacaaattttacttgtgattaattaactttttttgaaaagtgacggtattgagtaggagtcatctgcattttgttttgaaagagcttgaataaggagggcgtactcttgtaacctaaattttcagcgatagtatcaatagtcatggaagattctctaagtaatctttgtgcttcaatcaaacgtttttggtcgatcatttcttgaaaagtcgcgccagtttttgtcttgagcatattacctaaatagttttggttataaccaaactccgtggctaattttttgagagtgatagttgtgtaatgatcgttaatatattttaagagtgcagctaaatcatttctttgagaagttaacgacagttcattcaaactaggaattgctgctaattccaataaacatgatcctaaaaggagacttaaggaacgatgatagaagatttctttgagataaaatttgtgaatcatcaagaataaaagctgattgatgatcgcgtgttcttttaaatcaaaaactaaaaaagtattatgaacactatcctttttagcagcattcaaaaagaagtccgtgactggattacttgaagcgggcaagtggttcaagagctctgtttgtaaagtatgtttgtcaattaaaatattgagaatcaaatcatcttttcctacataatcaatttgctgaatcacttcagtgtccataataatcaattgctgttcagtgaacctccatgcctccccgtttattttttgccgacaacatcctcttagaaggtaattcatttcaatgaaactatgagtatgagcaggcgtataagagtagcgatgatgcttattgatataaatagatccctcttcaaaaaaatcattaacgggtatttttggaattactgatccatgatagtctaaattcatttcattaatattcttcccagtagttctttgctgggcttcaattcgatcttctatatcaaaaagtttaatcaaactttccatccgtcaatcacctaatttttttatatagttagttctatatataagttattcccaataaatagtcaatatttactttgctattaaagggtttgtcagatcaaacaaatagcctttcaaaaaaattcaaatttatgacctgtgaatttgatagtaaagacctacatttttgaaattgtaccattttatgtaagcgtttaatataaccctatgaacaagaaagggtgtttcaaatggacacaaatggaaagcagcaatcattagtgaaaaagtattctcttttagcaactgcagccggtgtaggttctatgttgggttctggatgtatcgtcggtctctcggcaactataccggtttggcaaaaagggttgaacttatctgcgggacaagttggattaatctctggtgcactaacctttgcaattgcgttcggctctttgtttgcagggcaaattacaaaaatcttcggcctgattcgagcgttcaactggatcaatttgttttatgctattggagcagcaatttgtgtattttcaggaaattttgtggctttattattaggagtcatcgtcatggggattgcatctggggcggatttaccaatcagtttaaccgttgtctctcatgatgcaccagatgaaaaaacttctgcaagtttagtatcttcgacacaaatattttggcaaattggtatttttatttcttatatttgttctttcttactttccggagtcaatggagttttgggagcgcgtattgtttttgttattttattggtcttttcaatctttgcgtgggtttggcggacagtctcaaaaaaatttcggatgttccacgaagaaggtgcagcacgtcagtctgcgttgaatctggttagcaatcaacaaaaaatttcactaaaagagatttttagtgggaataatgcaaaaatttatcgcaactttttcttcgctattttagtcttttatgtttgttggaatttgttagcgaatacatggggacaatttcagacatacgctttgactaatgctggtgctacacaaatgcaagcaacagggctaggtattgtgctgaatatcatttctttagtgactacgattatctttgcttcagtagcgggtggaaagcatcggaataaagcattttttgttggcgcttttgttcaattcatggcaatggttggtatggcagttattggcggtagtgcaggattcatcgcattggcgataacgattgctttttataattttggaaatccattagcaggggaagccatctataaagtttggactcaagaatcatttccaacagaatctcgggcattcttacaaggcattatcaatggtttttcacggttgtgttgcggattgtttgcctttgtcacaccatttttggtatcgccaaacaatattcaattttcgatgtatggctttgcggcgattgttctagtagcagctattgcaggagctgtcatgatgaaattgcaaaaaggagctaaaacgagagcaaacagtcgaagagattctaatctagctgatttagtaaagtagttgatcgatagaatataaatgagtaaacgaaaggaacggataatagtgataacaaatgaacggccacgatggatctggtatgctggcgattttgaaatacgtcaaggacttttacaaaatttttctagagaagaacgaggatacgattggccagcttactggtatattgatgactgccataaaaatgtaaaatttaaacgtgaatatgaattacaaagtcccacgacatttgttgtatatgcaacagggattggctttgtagaagtgaatgaagtgaaatattcttttgaacaagagattgtctgtcaacccggttttaataagattagggtgaatgtagggaatccaaacggtttgccagccatctatattgaaggagaaagaatcaagagtgatgaaggctggtattgcagtaactttgttgaagaagctccagtaggatggagcaatctttatatgaataaagagcaagaccctaataaagtctattatgaaatagaaacttgtttccctgtttcgaagacggcggttgctggcggcacgttgtttgattatggacggacgattttcggttcattaatgatcgataaattgttgtcggagataccgatatctatttgctatggagaatcagaagcagaagcatgtgatagtcaaatgtgttattacaaacaggaaaatgtaagaaaagaaacaaacattcgcaaacgtgcttttcgttatcttttcattcctaatatagcaccagaagcaattgatattcgtgcgatgcatgaatatcttcccttacacaatcaagccacattcaaatcagatgactctgtgatgaatcgaatatgggatatatctatagaaacctttacattgtgcagtgggcttttctttattgacggaatcaaacgagatcgctggatctggtcaggggatgcttaccaaagctattttatcaaccaatacttattctttgatgaagatatcaataagcgaacgatcatggcattgcgaggtcaaaatgaagtaaaacagcatatgaatacaattgttgattattccattttatggatcatagggattgaaaatcactatatgatgtctggggacagctcatttcttgcacagatttattcgaaaatggtgactatgatggactatcttgaaaaacaaacccatgagttaggatttatttatggtcgcgaaaaggactggatttttattgattggtctgaaatggataaggaagggacattggcagcggaacaagtcctgttattgaaagcatacaaagctatgactgtttgtggctctatcttgaatcgtgatattgatcactatgtgacaagatatgaacagttgaaagctaatttaatgagttatttctgggatgaagaaaaaggggcatttattgattcttatctatctggaaagagaaatgtgacacgccatgccaatatttttgcggtcttattcgactttgtagatgaaacgaaaaagcaacaaattttgaaaaatgtattgcttaatgatgaagtcactcaaatcacaactccttacttcaaattcttcgaacaagatgccctttgtaaactgggacagacaagtcaagtacatgagattattcttgactactggggtggaatggtggaacaagaagcggttactttctgggaggagtatattcctggagaaagtggaaatgctatttatgaaatgtatggggatccttttgggaaaagtttatgtcatgcatggggagccagtcctatctacttattaggacgttatttcgcaggaattcaacctattcgaccaggttatgaaacattcttagttgaccctaagctcgattcttttcatcaattaacgtgtatattcccagttaaaggtggctgggtgaagattgagaagacagatacgtgcttaacaatttgtacaaatcgagacggtgggatcttgcggatagatggaaaagagcagccaatgtttgccaatcaacctgtaagttatgaggttgtaaaaaaggtctaagctggattcatcaaagaaaggaagaaagcaatgaatagtgatcggttaaaagtgtctgaaaaactcggatttgccttaacaaatctagggaatatccctattatgacactattaaatacgtatttgttaattttctatacggatgtcattggtgttaatccagctttggtaggaatgttattccttgtttcgagacttttagatggcgttagtgatccacttattggttttgtgattgatcgttttccaagaacaaagatagggaaatacaaacctgtgttgattttaggagtcatcatctgttgcttaaactatttgcttgtttggttttcgcctctcctatttccagctcaaaaaatcattgctattagtatttcttacatccttctaggaattacttttgattttatggatattcctttgaatagtttaatccccgtactgacgcaagaggatgaagggcgtaatcaactttcatcaatcaaagggatttcatatacggtaggtccagctatcttaaatgtagcagcacctttggcaatcgcagcttttgcaacgtctttgaaaggatacgttttattgattgtagggacggtactagttgttctattttttacgattgtagggacgttgatggtaaaggaaagagggacggaagctgcctatgtaacaaagccggtaaaagaaaaatatacaatgaaggatgcgttatctgtattcaaactgcgtccagttgtttcattgtttctagcaatgctattcattacagcggcaacgaacatcttcaatggttcacttctatattatcttagttatattattagcaaccctaaattattgagtgcagccagtttcttaggtatgctgggggcattggcagcagggcttctggttccaaaattatcgcagcgatatggaaaaaaacatctgtacattacaggtttggtattgatttcattatgtatgctgggatttctggtcatcaatcatcactcagccgttttcgttttatgctattgcggggtgcaatttgcattagggttgacgaatacactgcaatacagtatttcggccgataatgttgatacgataagaaacgaattagacatagaggcgacagcattgattgcttctctcacttcattaatcatgaaatttgcgatggctataggtggtgctgttccgggatttgtgttaagttttaccggctatgcagcgaatcagtcacaatcaagcactgcggaaaaagggattttattcgtgactttcgttatcccgctgattttatatgtagtgacgatcgctgtgttcagcagtggttttaaaagtaacaaaattaaaagtttgcatgtgcaaaaacgaaaaacaatgaactaagagcgaagtagcattttcattaaaacgatcttaaagcgagaaaaatctatcttgaagatggaaagaaataaatccattctccggatagattttttctgctattgttattcgactagctatacggatgcttcgcaggaagaagtttttgtttacagtatcctccctcaaccttcaggcaaatctgccatgtatctttcggttccttgaaagacggccaattgttctacaccgaaggagcacagcatctggctcatttcggcaaataacaagcgataatcactggacttatgcgcatctgaacctagtgtaaagagtttgccccccacactttgatagagcgggatcgcatattcgtaaagtgatgcattttgataaggaccaaagcttttggcattgacttcaaaagctagctcgcgagcgacgactttcttgaaaataactgtcagttctttttcgaaatgctgtgcaagttcttctgctgtaaagtcgaagcgccgcaacccgtagtcaaaatgggtcaggatatgtccgtcagaaaaagtatctaaaactgtggccatctgatcaaaataagacttgacgacggtaagtttgtctttctccaatacggcatcatccatatagtcaaaggaaccgttttgatggatgctgactaacttcaggtcataaggatgctgatccagatagtcgcgtatttgtgtttcttgcccaggaacgacaccgatttcgatccctttcaaaagtttcgttgctgtttgttcctgtaaagtctgatggcattgttgaagctgttcataatcgggaatatcatcgcgataatttgaataagggttcttgagatcaaagtggtcagtcgccacaaaaaattccggttgaaaagctaaataattttcgaagcgttcttctgaatcaaaagataaaaaagtatgcaaatgctgatcgtagtaattcataataacctcctttttgtacaagataccataaaaagcgagaaacgactattttttcataaaaaatcagaaaagcatttcgtacaaaaattctttgttctataatggatgagaatggaagcaaaggagtaaatagcagtatgagtatgtatcttgagattccggaatttgaaagcgattttcgctttcggacattccttaatgatgggctgacgatcgtttatccccatgtacataaagaaatcgagctgatttatgcgaaacgaggaaaagtcaatattggggtagctgatgagatcattgagttggaagaaggcgagctgtacatttttgccagtggccagccccactattttttggcttctccagagagtgagcgttatgtgtatcagtttgatttcgcactgtttgatgaaaccattttgcgagaaaaagaactttctttaaaaacactttttgacgagggggaaccccacagcaagcattggccagtcagttttaccgaaaaaatcacaggattgttgatcgaactctaccagttagaggaagagcaagtagctggtaaacgctatttgactatgggttttttgtatcagttgatcggcgaatgttatcaagggttgccgccgcgtgccaaaaagatcgctcctttaaaacgttctgcagctcaatacaaagaaacgctgcaacgtctggatgaagtgtttgaatatattgaatcccattaccaagatgtcttaacgatggaagaaacagcgaagcatgttggattcagtccccattactttacccgcttttttaagacgaatactggaaaaacattcatgcagtttctgacggaataccggatcaatcaagccaaattcattttggcaaacgagaaacttccaatggcagaagtagcggaaaaagccggatttgccagtgtcaaaacgttccatcacgtgttcaaagagaccgtaggacaatccccattgcagtatcagaaacaattaaataattgaatacttgatgaaagctagatcaacgagccaatcttgtcaatcactcgaacccttgaacaagcgcattttttaagcgattgttcactgtttgtttgggtgcttttatttggtgtgaaggagtctttgattcgttttagtgagagttccataagataaatttcgggaattttttaagaggaaattgggaagaacctgtcaaatcctttcgctataatgaatgagtagaaaataataagcgttttcaggaggaaagagatgacagtaagaattggaatcattggttgcggtgggattgcgaatggcaaacacatgccggcattatcacaagtaaaagaagcggaaatggtcgcattttgtgatttgatcgtcgaacgagcagtggaagctaaaacagctttcggtacagaagatgcccaggtattcagcgactacaaagaaatgttagcagaagctgaattagatgttgtgcatgtttgtacaccaaatgcttctcacgcggaattgtccatcgcagcattagaagcagattgccatgtaatgtgcgaaaaaccaatggcaaaaacgacagaagaagcaaaagcaatgatcgatgccgctaatcgaacaggcaaaaaattaacgatcggttatcaaaatcgttttagaaaagattcccgctacttgcacgaggtttgtgcggaaggacaattaggcaatatctattttgggaaagcccatgccatccgtcgtcgtgcagtaccaacttggggtgtctttctagacgaagaagctcaaggcgggggaccattgatcgacatcggtacgcatgctcttgatttaacattgtggatgatgaataactaccaacctaaatttgttgtcggaaaagcttaccatgaattatctcagacaaagaatgcggcgaatgcttgggggtcatgggatccagagaagttttcggtagaagactctgcttttggatttgtcgtgatggaaaatggcgcaacgattttcttggaagctagctgggcgttgaacagtttagatgtcaaagaagcaaaaacaacattgatgggcagcaaagctggcgcggatatgaataatggcttaacaatcaatggcgaagaccatagtttgttgtatgaaaaaaatattgagttggaaactggtggtgtcgacttctatgaaggggacggcgaaacgcctgaaatcttggaagcacaatcttggatcaacgccatcatcaatgacacagaacctgtggtcaagccggaagaggcaatggtagttactgagattttagaagcaatctacaaatcctcagcaactggcgaaccggtctacttgtaaaagcagtcgctaaaaaggagcaaagcatgaaaccaaaaatcggactacagttatggagcatccaagaagcgtgtaaagaagacttgttccaagcacttgaaagtgtcaaaaaaagcgggtatgacggagtcgaattcgcgggttactacggttattccgcaacagaggtcgcaaacgcgctaaaagaatacgacttgggagttgctgcttctcatctaccctttgaaacattgcgggatcattttgaagcaacactggcctatgaaaaagcgatcgggaatcaccgactcgtggttccatatgcttcatttgagacattcgcagaatggcaacagtttgcccgagagtttgcagaagttgctaagaaagcagctgctcagggctttgaatgctactatcacaatcatgcccatgaatttaccgagattcctaataaatcaatgattgaagaattgttagctgaaaatccagcacttaaattagaagcagatctttattggatcgcttattccggcactgatgttttcacttggttgaaagaacatcaagagtccgttggtcttttgcatatcaaagatatgcaggaagaaccaaaagaaagcacagaaatcaataatggcattttacctatcaaggactatgtcacagttgcgcaacaattccaattgccttggttgatcgtggaacaagaagcgttccaaaaatacgcacctttagaagcgacggccatcgattatttgcaattaaaagctatcgttgaggaggtttaccaatgatccatgtcactgtttggaatgaatttagacacgaaaaaacagatgaaaccgttcaggcaatgtatcccgaaggaatccacggacaaatcgctgcctttttgcaagcagatgattttcaagttcgcacagcaaccttggatgaaccagaacacggattaacaaacgaagtattagctgataccgatgtgctcgtttggtgggggcatatggcccatgatgaagtacaagacgaaatcgttcagcgcgttcaacaacgggtgttagaaggaatgggtctgattgtcctccattctggtcacttctcaaaagtcttcaagaaattgatgggcacttcctgtgacttgaaatggcgcgtggatgatcagcattgtcgaatttggaatatcaacccgagtcatccaatcgtagaaggtgtcggcgaatttattgaacttgagaaagaagaaatgtatggggaacactttgacatcccaactccagacgaattgatctttgttagctggttcccaggaggcgaagtcttccgcagcggctgcaccttccgtcgtggcaatggcaagatcttttatttccaacctgggcatgagacgtttccgagttattacaacgaaaaagtacaaaaagttatcaaaaacgcggcacgttggtgcgcaccaacagaaaatacgtacccaacgtacggccattatcaagccaatgaggaggtaggcaaatgaaattaggagtatttacgccattattcaatcatttaacgtttgaagaaatgatcacagaagttgcagaaaaaggattgcagacagttgagatcggtacaggaggttctccaggcaatgcccacttggatatcgataagttgcttgctagtgaagcagaccggaaagaatatttagctaaattagccgacaaaggactagaaatctcggcgttaagctgtcacaacaatcccatttcgcctttaaaaaatgaagcgcaggaagcagatgaattattacgcaaaacgatcaagctggccagtttgatgaatgtccctgtcgtcaatggattctctggtgtttcgggaggaaatgcaacagacacgcaagtcaactggcctgttctgccatggccaacggaatacgatgataattacaactatcaatgggagcaaaagctgatcccttattggaaagaaatcaataccgaggcagaagctgctggtgtaaaaatcggtattgagctgcatggcggattcttggctcatacgccttatacgatgttaaaacttcgcgacgctgcaggtaaagcaattggttgtaaccttgatccaagccatttgtggtggcaagggatcgatccagtggcagcagtcaagattttaggtgaagcagatgcgattcatcattttcatgccaaagatacgtatcttgatcaagataatatcaacatgcatgggttgacagacatgcagccatacagcaatgtcaaaacaagagcttggactttccgctctgttggctgcgggcacagcttgcaagtttggtcggacatcatttccgcattgcggatctatgggtatgattatgtcttgagtatcgagcatgaagatccaatcatgtctgttgatgaaggattgaaccgagcaatcactaatttgaaatcgattatgatcaaagaagaaccatccgcaatgtggtgggtgtaacgaggagtatagaaaatgagtgcaatcaattttgttgtcatcggttatggcggtatgggtgcttaccatgtgcacaacatcctgccgaatgaaaatgaacggatccatattgtgggaacctatgatatttcggaagaaagacaagctatttcacaagaaaaagggcataaaatctataaaagttatgaagaagtcttagcagatgaaaccattgaagcagtgctgatcgcaacgccgaatgatttgcataaggatttgtcgatcgcagccctcagagcgggtaagcatgttgtatgtgagaaacctgttgctttaaacactgctgaactagacgaaatcgttgctgtggccaaagaaacaggcaatacatttatggtccatcaaaaccgtcgctgggatccagactttctgatcgttcgcgatttatatcgtaataggcagatcggtgatcttttccaaatcgaatcacgggtccaaggtgcaaatggcatcccaggtgattggcgccatgtgaaaaaacaaggaggcggcatggtattagactggggcgttcacttgttggatcaaatactttggttagtggacagtccagtgaaagatgtgaaagctgacttaagctatattctgggagaagaagtcgacgatggattctttgctttgatcacatttgaaaatggtgtcaaagcaatcgtggaagttgggacctccaattacacccaattgcctcgctggtacattaagggaattgaaggaactgctacgatccaagattgggcgttgaatggtaagatggttcgggcaactggccgcgaagatgttgccgcacctaaacctgtccaagcaggtgttggattaacgaaaacaatggcaccgccatctgaattggctgcagaatcaatcccatttccagaagcgaaagccgattttgatcctttctacaagaatttttatcatgtagtccgtcacggtgctgaaccaattgtcaaaaatgaagaagttcgcaacgtcatggaattgatcgaacgaatctttgccgtagccagcgcaaaataagagcaatcaagacacagaaaaacgaatcccgccatagcaaatgatccctgttaaatcttgcagtcaaaggagagttaacagagatcatcaagtgatgcaggtgattgtttgcctgtgtctttttttattccgaaatataaaaattgaaaagcagatcctgcgggtaattgccccaacgatcgccaaaaatagttagaccgccagcgttttctgcggttgccggtgctgcaattttgaatgtaaagaaatcactgtgatccaaatcgatctcgcttaagttatggtcggtcagcttttctccgtcgatcgaagtatcaaaacggttgatccgcagatgtttcaacaagccgtattgactgaactcatcgatccaccattgaggggtcaatgccccccgtacatctgaaaagtttcctggaacagtataggttcctaaacagacatcgttgatatagaaagaaatatcactcggccaataattattggaaatagggaattcagaagcaatctccatgctgatttccagcatttcgattttttccccattttttagcggtttcggaattttgtactctaagaatccattgtttaaccagataatactggcatctactcgttcttgtgccaaaaaggatttaggatcatccaatgcgccgatcaggcgatcttttgtagccattccacaagaagcttcggctctaaaatcagtgaagtgaccaattttcacaggtaatgaagtcaaattcatttctggaaatactttttcggggaagttgatgttgatgaaatcagtctttaaagctagaaacttctttttccaatcttttcccgttcctttttctaatctgatcaattgtgcctgctctaattttttgatgtgcttggtcatgagtgcgttgctgattgccagtttttccccaatctcactgatgctttttctttccccgcctaactctctcaaaattgccaaacgcgtctcattggctaaagcttcataaaccggtaaagaggttttctctaaatttaattccattctattcacctcgttatacttttttgttaattgattgcgcaggtttattataacataacttgatgattttacactatagttaaacgatataaatattttattttagttgttaaatagctgttgacagcgctttattttgatgttaatttaacggtgtaaacagtttggtttttattgttgttgaaaaaagtaaagtgagttggaatatcgttttacaaataagttaaataataggagcgtggaaaaatgaaatttagtaaagcagctatagtagtaggggcgacgttgctgtgtggcatcgtattgtcagcatgtggaagtggcggcggcaactcaagcaagagttctgaaattttgttatggtcatccacaactggaccagatggggagaaaatcaaaaagacgattgacgaatacaatgcgacggatccggatttcaaagtgaaattagtgagtatgcaaggggataccttcacctcaaaactaattacagcaggtaaatcggggaaaggtgtaccagatttggctttagtcgcttcagaagcacttcccacctataagaaccaagagatgctggattcttgggatgacatgatcaaaggtacagagctagatcgcagcaattatgttgaagcagcttgggataccggcactcttgaggacagccagtatgggattcctgccaccatggggtcgtgggtcatgtattacaacaaagatctggtagacaaatacattcctggagcattagatgatggcatcgtgacctatgaagaaattaatcaggcaggtgaaaaagcaaaagcagatggcgtttatagctttggttatacctgggggatgcagaattattccaatctatatcagcaaatgggcgggcaatggcaagatcaagatggcaagatcaatatcgataatgagtattcgtataacacggtaaaggagttcaaaaatttgtatgatgcgggctacatggtgccagacggggaagatgccaataaactttttgcgaatcaacagctgatcttcttgccagaaggaacgtggatgttgagcaatatggaagaaatcagtgactttgagtggggagaaacctttacaccgcaatgggatgcggaaaatatcgttcaaggatcgggagttgatcagtttgcgatgtttaagacaaaagaagaacggtctgatgaaaagaaagagggaatggtggatttcttgacttggttgcaggcaaaccagttagaatgggtgaaatctggcgccaatccaacttcactagcgatgcttgacaatgaggaatatgtcaagatgccgcaatctttcttgttgaaaacagaaaaaggacaggcggcgatctctgtgaatgcagtcgatggattgtcttacatttttgatgaatacgacaatcgttcttgggacatgatcactggaaaagccgatattaaagatacctttggtgaaatccaaaaagtcgtggaagagaaaatgaaatagtcgcagggtctgtgacaaaagctgaaggcaaagaagatagtgctcagacatgtcgagaaggcacataccaaaagaggactcatataagatttctcaaagagtggccttttgatctggttagcttggcaacttacacgaaagagcatcttccatgcagaagtggtttttgtcacagtctttttctagtcgattttatcaaggcatgaaaggatgcgtaatgtatgagtagcaaaaaaaagctcagtggttggcccgttttgtttatcggtccccacatgattctttttattttattctttttggttcctgctgtaattggtgtttatgtttcctttaccgaatgggatctttttagttcaccgatttttattggtttagacaattttaagacgattctatttgatcaagactcgctgtatcatacgcaatttttcaatgggatgaaaaacacgctattctttgcagtgatatcagtacctctgtgtatcgcgattccattgctattagctgtggcattgtccgcaaagccaaagatgatgcgcttttttcaatcggttctttacttgccgacattgtttgccatctctgctgtaatgatcatttgggggtttctgttaagtaaatcctttggcccgatcaaagaagtttttgggatagatatcaattttgtcgggacacaaccatgggcctggatcgcgattttgatcgtaacgatttggtggacattaggaggaaatttgatcatttatgtagctgcgttgaacggtgtgcccagggaacaaatggaggcagccgagcttgacggagccagcagtgtagtgaagtttttccggatttcgttgccgagtattcggaatcagctgatttttacaacagtcatgacgactattgctcaattcaatatttatggacagccattgatgctgaccgggggtggtccgaacaattcgacgagagtactcatgatgtatattcaagagaatgcttttggcagtagtacgtccgttgccggtatgtcatcggcgatggcgattttactagggatcgttatcatgatcgtttcggtctttcaatttatcatgatcaaaaaattagagaggtaaggggacagccatgcgagaaaataaagtaggaaaaagagtcgcatttatcgtattagctattgtttgtattgtctggatttttcctctgatatgggctatttttacctctttcaaatcagatgctgagattcaaaaagttggctttagcctgattcctaaagagtggactttcgcaaactttttagggttgttgcaggggaatgattcatcgccagtctttcgctggtttttgaattcgatgatcatttcaacagcccacatattgttggtgatggtgatcgtttcttttgcggcttatggctatacacggctgacgtttaaaggtcgagacttgatttttgcattattgctgggaacgatgatgtttcctggtgtcgtcaatttgatccccaatttcaaaatcgtggatacattaggctggaccaacacgtttctagccgtgatcgttcctggcgcagcaggtgtctataacatttttctagttcgtcagtttatcttagggattcctaaagaattggatgagtcggctgtaatcgatggggccaatgaatttcagattttttatcatattattctgccgctgatcaagccggttttaaccgtcgttgcgttatttagttttactggttcgtggaacgacttcttgtggccttctatcgttatgagcgatattgataaactgcctatcacgccgggacttcagttgctgcaagggcaatatatgacgtatccgggagtaggagctgcaggagctcttttagcattgatcccgacattccttttatatttagtggcgcaaaagagtttcatggaatcaatgtcattgcaaagtggtataaaataaattgttttttggaggaactatgagcagaaatgaataccctagaccccagtttcaacgagaaaactggctgaatttaaatggagaatggcacttcgcctttgatgataaaaatgtaggactaaaagagaaatggtatcaagaggaggaagcctatccgcatagaatcaaggtgcccttcgtctatcaaagcgaattgagcgggatcaaccaacgagaatctcacgatattgtctggtattaccggacattcacagtgcaggcaatggacagtcaacgtgtagtcttgcattttggtgcggtggattacgaggcggatgtctttgtcaatggttgtcatgtaacgaatcatcaaggcggtcatacctcttttgaagtagatattaccgattatttggtcgacggtcagcaagcgataagtgtgcgtgcatttgatcctcatgcagatgaaagtattcctcgaggaaaacaattctgggagacagaatctgctggtatctggtatacgaattctaccgggatttggcagccagtatggttggaagtcgtttcagagacttatttgaaagaaatcaatttgactccaaattttgatgaggggaccgtgactgttgaaacgatcttgaatcagttccagccgcagtgtgaactggactatcggatctcttttaaagaacagctaatcgcagcggggagactgtctgcagattcggcaaaaatgaagttcaatgtcgatctttttcaggaacatattttcagaagcaatttccatcatgacggttggtcttggacaccggaaaatccccagttatttgatattaaactttctttaatcaacgatggagaaacaattgactacctgaaaagttatttcggcatgcgtaaaatccatacggaaaacggcatggtctatttgaacaacaaaccttactatcaaaagttgattttggatcaagggtactggcctagtggcctcttgactgcaccgtcagatgaagactttaaaaaagacatcttactagcaaaagaaatggccttcaatggttgccgcaaacatcaaaaaacagaagatccgcgctttttgtactgggcggatcagttaggttttctggtttggggagaatgtgcggctccggcgatttacaatgaagattctgttgaacgactgatgcgggaatggaccgagatcattgccagagactttagccatccctccattgtgacttgggtgccgatcaatgaaagctggggcgtgccaaagatttcctttgaccgaacacagcaacatttctctcaagcaatgtatcatttcttgcacgcattggataaaacacgattagtgatctcaaatgatggttgggcaatgacagaaacagatatttgcgccattcacaactatgcccatggccaaaaagaagaaactgagaaatatgattactttaaagaaaccctccgaactcgcgaaaatctgattaagcggctttctactccgtggccgatttttgccaacggcttttcttatcaggagcaaccaatcttgttaacggaatttggtggcatcggctttgatgtatcgggacaaccaggttgggggtatacgtcagtcgacaatgaagttgaattcttaaaggactaccaacgggtgctgtcggctgtctatgcttcagtagggctctggggatattgctatacgcaattgaccgatgtcgaacaggagatcaatgggttattgacttatgaccgtcagcctaaagtggacttggcagcaatcaaagctatcaatgatcaatttcatgtttctcaagttgaatgatatgcagacggcaacattggaaaggagagacaatgagaaaaaatggtattatttgtgcattgattttggcgactcctttcgtaggaggttgcggtacttctcatgaaacgctggttgacgatttcacagcgatcatcgacaacgatggtgcagacccgtggatttttcaagatgagaaatattattattatacgaaaactactggtaacaacttaaccctttggcgttcggaaaatctgactgaagtagcagcgggggagaaaaaagtcatctgggaaatgcctgcggagtttgaaagtatctgggcaccggaacttcatcagctggatggtacgtgggtcgtttattttgcggccaatcatccctcagaaacccaccggatgtatgtactagtcaacgaaaaccaggatccttacagtgatgattggcagttggaagaaatcaaaggactggatgacaagtttgctattgatggaactgtcctcgaattagacgaacaacggtatttcctttggtcaggttgggaaggatatgaaaatattgcccaaaatatttatattgctgaaatgatctcacctacagaagtcattggtgaaaagcagctgatttcgactccggaatacgaatgggaaatgcggcaaacgccgttgattaacgaagcacctcaagtgatcatcaaagaagatacggtgaatgtggtctattcggctagtggaagttgggacaatgattatgcactgggacttttgacaatggatcgccaagatgatccattagatacccgaagttggacgaaagaatccgaaccgatttttcagcagacagaaactgtttttggtcccgggcacaatgggtttgccaagtcgaaagacggcaccgaagactggttgatatttcacgctgctcgttgggatcattctggctggcaacgctcgattcgtttgcagccgatcaaatgggaagaaaacaagctgaaattagaagttcctttagcggataatgaaacacagaagcttcccagtggtgaagcaaaaaggatccgaatgaccgccagtgatgcgcttcttgaaggtgatttagtaacagtgacagacgaggaagcattgatgaaaaaagtggttcaagggtttgaatcgatcgaagatcgtttggtttttcaaccaacaatgggacaggctagtgaagcgacggtcatcgtttatcttaaaactcaagattatttgtcattgaatgagcccgtgtatgttcaactgaaaacagatgatgacagccaacgtttggcggtctatccgtcacaatactatcagcctatccaaactactatgaatttgaaagcaggcactatcaaaatcgaagtgtcttcagaaattggggtcgacacactgagtgtcgatcggatggagatcataccaaaagagggagaatagtttctagagctgctttcagtggtttagatatcataacactgaaagcaatggcgtggctcaaatggccatgctgtgatctgtcttgttcaatttagggctgttcttcgatccgaatgaagcaaactaacatcctaaagcagtgtcatggacagacgtgccatgatactgtttttttttgagtaattaggatgagccgctgatagagctctaggccaagataggcagttttccttcttccatgtataataaagacaaatgggacggagcaaatcgttttacaaagtagacgtaaaagtaaatgcaaatgaggtgaatggatgaaaaccaggcaagaaatgattcgatcttcaaacggcaaagatcaactttatgtgaaaatttggcagccggagggacagtccaaaggaatgcttcagctgatccatggcatgattgaacacattgaacggtacgatccgtttgctcaatatctcgtttcaaaaggattcacagtgatcggtcatgatcacttgggacacgggaaaacagtagctgagcaaaacgagtatgggacatttggagaaacaaatggtgcggattatcttgtagcagatgtgggattggttcagcgttttgcgttggagcagtttccagctcaaccttattatcttttaggtcatagtatgggctctttggttttgcgcaattttttgtatcagaaaaatacaaaattggcaggagcaatcattatggggacgacactggaagcgccggccaaaatgaccagtgccgctttattgacgaagtcgttgatgccttttcgacagcaagcatggccctatcgcgtgatggaaaatctggtttttggtcaacataatcggcggtttcagcccaaccgaacggcgaaagattggttgtccagtgatccccaacaagtagatgcttatttagcagatccgcatacgcaatttcatttttcattaagtgcctatcgagatttgtttttattgacaaaaaaagcgagtgccccccgcctgttgcagaaaatcgatcgcgaattgccgttactgctgatttcaggaaaagaagatcctgtgggccattatggcaagagtgtccgtaagctagcaaactatttgaaccagcaagggcagcggcatctgacagtttatttgctggaaggcggtcgtcacgagatcttaaatgaaaccaataaacaagtcgtatttcatgaaatctggcaatggttagaaagcaattgaggaacgttatcaattgctttcatctttttttcagaaaattgagaattttaattatttttaaccttttttcatattcctccttctgctataatgggtgtcacatctaacaacaaaggagagatttttgtatgactgtttataacttttcagctggtcccgccgtcttgccccgccccgtattggaaagagctcaatccgagcttttggattatcgtggcagtgggatgtccgttatggagctgagtcatcggtcttccttgtttgaagagatcattcaagacgcagaagccctcttgcgggaattgatggcgatcccggataactatcgggtgctgtttttgcaaggtggagcaagtctgcaatttagtatggtgccattaaatttagcgaaaaacaaaaaggccctttatatcaacacgggctcttggtcaaaaaaagcgattcaagcggctgaagcagttgctacggttgaggtgatcgcatcaagtgaagataagcattttacttatattccagaaatcacagtagataacatcgaccaaacagcgacttatctgcatattactacgaataatacgattgaaggaacagcttttcagacgattccggatgctggcaaagtcccgatcattgctgacatgtcatcaaatatcttggccaatgagtatcgtgtagaagatttcggtatgatctatgcaggtgcccaaaagaacattggaccagcaggattgacggtggttattattcgagaagatttattaaatgaagaagcggtctttgctccaatgttggactatcgtcttcaagctgacaacggttccctttacaatacgccgcctacttacagcatttatatcgcaaaactggtttttgagtggttgaaagaattaggcggtgtagcagcgattactgcgcaagaccgacaaaaagctgcactgctctatcaagcgatcgaagcatcgaacttgtttagcagtcccgtagacaaaaatagccgctccctaacgaacattccttttatcactggcgataaggagctggatcgacaatttaatgaagctgcagaagcagccggctttaaaaacttaaaaggacaccgttcggtaggcggtatgcgagcaagtttgtacaatgcgttccctatcgaaggcgttcaggcacttgtcgatttcatgaaatcattcgaagcggaggtcaaataaatgtatcagatcaagacattcaatgcgattgcaccagaagggcttcaaaggctaaacaaagaaaaatatgccatcaatgaaagtgatgagccagaaggaatcttgctgcgaagccaaaagctgcatgactatccttttccaaaaagtgtattagggattgcgcgagctggagctggtacgaacaatattccggtcaaagaatgtacagaacaaggcatcgtcgtcttcaataccccaggagctaatgcaaatgcagtcaaagagttggttattgcaagcttgttattaagtgttcgcccgattctccaaggtgctcaatgggtccaaacactgaacggatcagatgtagaggaacaggcagaagccaacaaaaagcaattcgccggtacggaactagaaggcaaaaagcttggtgtggttgggttaggctcgattggtgccatggtcgctaacgatgcctaccgcttagggatggaagttgtgggctatgatccttatgtttcggtggacacagcgtggaccatctcccgcagagtcaaacgggccaatgatttagcagaaattttcacaacctgtgatttcattactcttcacgtgccattgatggaaaacacccgccatttagtgggcaagaatgaattggccaaaatgaagccaacggctaaactgtttaacttttctcgtagtgagatcgttgatacagctgcagctcttgctgcgttagataataatgagattgctggttatacaactgattttgcagatgaacgcttactgggccatgacaacgtgctagttctaccgcatttaggagcatcgacagaagaggctgagatcaattgtgccaaaatggctgcccgcacattgaagaaatttttggagtttgggacgatcaaacgctcagtgaattttccaaccgtagaaatggcgttccattcgccgtatcgtttaacagtgattaaccgcaacgtgccaaatatgctaggacaaatttcctcgatcatcgctgaatctggaatcaacatcgataatatgttgaatcgcggacgtgacgactatgcctacacattggtggatgtcggagcaacagatgctgcattgcttgaagcggtggcagataaattacgagctaaagaagatattattcgcgtgcgagtgatcaagaatcaggaggtaggctattaatggttcaagtttttccttttaaagcaatccgcccacaaactgacttagcagagaaaattgcggagttgccctatgatgtagtcaacacgcaagaagcagcggcatatgctgccggcaacccttacagctattttcatatcgatcgctcagaaatcgatctgccaaatattgctccttatgatccgcaagtgtatgcgaaagcagcagaaaatttggctgcttttcgagaaaaaaaatggctgatccaagacaatgcaccgtcctattatttatatgagctgacaatggcggggcggagtcaaactgggcttgttgtttgcacatcgattgaggattatgtagctggtaaaatcaaaaaacatgagtttactcgaccagaaaaagaagttgaccgcatcaatcacatccaagcttgtgatgcaaacacgagtccaatctttctaagttaccgtcagcctgagtccttaaaaaaaacgatccaggattggcagagtcaccatcaaccgatctatgatttcacgagttaccatgaggtccatcatcgggtttggctgatcgatgattctgcggtgattgctgctttatcacaagaattctcagcgattgatgcgttgtatatcgctgacggccatcatcgtaccgagtcggcagtgaaagtcggcttgcaaaagcgcaaggaaaaaaacaatagtgaggaaagcgagcgcttcttagcgattttgtttccggaaaatgaattggcgatctgggaatacaaccgagtggtcaatgtaccgattccagatcatttcttcgatcatctagcagagaaatttcacattgagaagccaactagcagcaagccttctcaaaagggaaccttctatttgtatttgggccacgaatggttctctttaaccatcaaagaagcagggaatgacgcagtcgaaagtctggatgtttctcttttgcaaaaaaatatcttagcgccattactcggtattgaagatgtccgcacagataagcgcatcgattttgtaggaggaattcgtggtccagaagaattggaacggatggtggattccggagaatggacaatggcctttttgatgtatccaacgcagatgaaagatttattggctgttgccgatgcgaatgagatcatgccgcctaaatctacatggtttgaacccaaattgttaagtggtctgtttttacatgatttagaaaccaaaagctagaaagctaaaaagaaaaaagccgcacgtctgcagagaaaactgcgatcgtgcggcttttttctttttttaaaaaataccagacattgtttcgatgatcaagcgaatgttgaggactgttaatgcgatggcgcaaatccagcccagagaagtgacccacagagggttcttgaacttttcgcccatgatttttttggaactagtaaagtaaaccaatggaatcattgagactggtaatgcaatactcaaaaagacctgtgaatagatcaaaagattatctagtgcctgttcattaccgccaaagtagagggtacatagtaaaacaggtacgacagaaaggccacgagtgatcaatcgtcttgcccatgttggaatcttcatatggatgaagccttccatgacgacttgtcctgtcagtgttccagtgatagttgagttttgtccggaagccagtaatgctacggcaaaaagaacactaagggctggactagccaccgctcccgcgatcgctgaattttgtaaggcatcatacagcgctgaaaaagtaccgacttcttcgctgtgaccgaagaacaatgcgctccctaaaatcagcaacagacaattaacgacaaaagcagccgaaagctgaatatttgaatcccatgtggcaaagcgaacagctgtagcgacttcttgcggattcgtccgatcaatctttcttgattgtgaaatcgacgaatgcaaatacaaattatggggcatgacggtcgcgccaacgatccctaatgccatggtcagctgtccagggttcaatacttgtttttggggaatgaagccttgaacaagtgccggaagatcaggttgggcaataatcacttcgtaaacaaaaacaagcagaatcaccaatattaaggtcattacgatggcttcgatttttcgaaagcctaatttcatcaagaaaagcagtaaaaagacatcgaaaatcgtcaaaaagacccctacaactaatggtagaccgaataatagattcaaagcaattgctccaccgattacttcggcgatatctgttgccatgatcgccaactcggtaataatccaaaggaaaaagcccagctttttactggtgtgtttacgggttgcttgtgcgaggtccatatgggtgacaatccctagtttagctgccatgtattggagcaacatcgcaatcagacttgaaatcaagatgacggatagcaggagataaccatattcggcaccacccccgattgaagtgatccagttaccaggatccatatacccaaccgcgactaacgctccgggaccagaaaaagctaaaagattacgccaaaaattcccatccttgggaatagctacggtattgtttatttcttccaagctaggtccatttgctgcctggatcaattttttttcttcattcattctgtcacatcctatctttttaggtgtacctaaaaacaatcttattgtattccttgtttatgaatttttcaagagaaaaacttctgaaagtttgcattaactaaaaaaacagatattagaaaaggacagatttcgtttgccaaggtgattggtgattgttggattgatcaatcctaatctaaaatagggaatgttgctctacatagaattgatgaatgaaggaaatctatttgatcccacttgtttagaaagaccgaaaattttcttaagaaacataaaaaaacaagaagcactcaaaattgatgattttgagtgcttcttgacgctggattgtatgtcgaggatgaatgaacttttatcaggatcttttttatattcttattatgtcaaaagaacaagaagagcagcctttagaatgttaataaccaagtttattaatcaaagaacagccaagaggctgcccactattgtgcgacgtgtatggctatcaataataaaaagtatcattgttttgtgttgttgctgataaaacactgtgtcagcgtgtctacaaattcatcgaaggtggttatggcacttaatttatgaatgttttgttcatctgtacaaatcatggccagatcatcaaaaatttcccgaaacacatgacggttatggtaattgatggaaatcaaaaaaaccaatgtgacacgattatttccccactggatcccctttggattgacggcaatcgcaacccccgtacgattggcattcattgtcagtgaatgtggaatagccactgaaccaaaggcagtagaagaaagttgctccctctcaattacttgtggataaaaggtctcgtccacgattccttcttctttcatttgaccacataattgtttgagcaattctgcggagttttgattttcagttgtatatgagaatcgctttttatcaacaagcgatagaaaggttttcacaaattgttcttttcgttttttttctttgatatcaaagatcttggcggtaatttgttgccgatcttcaagggtaaaaaaaggattaatgatcacgtatggggtagcgatcacttgcttcagtttaacagcagacacaatcagttctgtatctacatactgcaactctttttcactagtaagaatattctggatctcaaggtcatcagagaaatttttctgaagcttttccatcacctgaatattcatgttgtagtaatgaggcactagaatcgtgcagtttattttattcgtacgctgtttttgaatttctaacgcatagcctaaatgaaaagctatgtaggcaatttcgtcttcactaatcgtataaccgatttctttttgaatgacatgagaaacctggacggcacaatcatagatgagcggacattctttttttagtgtttctgtcattgggtttctacaagagtagccgttattgatccgatacagtaaattctttatatggagggcaaatcgaatgaagaactcaggttcattgccatcaataaagtataattcatccacttttgctagaatttttcttactaagtcaaggcagtttttgtccgtgaccttctctaactcatcaggtgaaatttgagtgaaattcacgctagttccattcgctgaaattaggatagctaaatcacgaatttcttctttgggaaaacgaataccgtaccgttccgctactttttccgcgattttttcggaaatttttagtactgtcggatggattgagtgaggcgcttgagcttctgcttcaggagactgaaaatttcctttcatacggtctacggcaattgctagatgaataactatatttgttaacgcataatcattcgtgaaaaaatcatagtctgaaaaaagttcggcaataatttccttgatataatcaaggtcaaaatctataaaactttcttgtagcttagtcatatcaacgaaatgattatccaattcggatagcaatgtctgatggattaattgtcttttcgctttttctgtcccaatcaactgtagtgtatctttggttagtctgacttcgatagccagttcagaacatttttttttaagtttttttgcatcactcaataatgtggactcgctgataaatagttcttctgctagatcataaacagatagagcttcctcggttgaaatcagtcgcaaaaggagataagcagttcgttcagtaggtgtttcagggacacttgtttctgtgttattgaaaaaagtgaccagattacttgctatcactcgatagcctttgtttgaagaaaggatcaaatcagattcattgtcttgaatatctgcgatatacgattttatcgtccgtttggataacccaaatttttccgctaattgagtggaggaaacccaattgtcttgctcatttagatagtgaagaagttttatatactttgctttcattggctgacaccctctctttcaccactgcagtgcaaaagaatatttgtttcaccgctgtagattgactatagtataactgtaattgatagcgctatcaatgaaaattgaattgggggagaaaaatcatgaaaaaattgaatgttttacttgtgtgtggatctggagccagctcaggttttatggctgctaatattcgcaaagctgctgctgaaaaaggattggacataaaaattactgctcgcggtgaaagtgagattgaaaactacattgacgacattgatgcgttaatggttggtccccatctggcgtatattttggatgaagtagaagaatttgttggtgatgcaccagtgaaagtgattttgatgaagcctgaatactatgccacattaaacggaaaacaagctttggatcacttgttggaagaggtacagtagctttcagaatggagggaataaaatgcaatccttaattaactggctggaaaacagctttacgcccaaaatgaataaaatcaatcataacgtttggatcgtgactcttaaagactcaatcatgcaggctttgccattaattttcttaggatcggtcttttgtatgctggcaattttaaatgattattttccaagtttacccaatttctggacgccatacggatggacgatggggatgatctcacttgtcatatcttttctgattcctttcaacttgatggagaaaaaaagactgcgtaagcaaagaatcaatgctggaatgtctggaatcatcttatttttgattattatttctccacaagtcattgctgacggagaacctggttttagtcatagtgcgcttggtgcagggggaatgtttattgcaattgttgcaggactattcgctggtatggtgttgaatttatttggaaagttttcttttttcagtgaggaatcggtgattcccgattttgtccgctcttggtttgatgctatgctgccaatcggtattgttgtccttaccggatggatcttcgttgatcttcttggctttgatgtctacaatgctgttctagccatctttatgccattacaaagtgtgattgagacgccatggggcttttcattgatgatgttgattgtttgtttcctctattcgttgggaatttcaacatgggtattaacgcctgttttaaatccagttttattgactgctattcaagcaaatattgacggaaaggcaatgaatttagtaactgatccaactatttattctgcttatctatggattggcggtatcggctgtacaatgcctcttgtttttatgttgatgcgctccaaatcaaaaaaattaaaagccttgggtacggcttcggttgctccgacgatttttaatatcaatgaaccgattgtttttggctgtattgcttggaatccactattgatggtcccgatgtggttacaagggttgatattgccattaattgtctggttatttacgaaagtcattgcttttgcacctattccaacagtcatgtttcaaatgtggtactgtccatttccgattgccacttggctaactaccggaacaatttcaggcattctgctaatgctgattgtttttgtcgtggcggcagcgatttggtatccattttttaaagcctatgaaaaacaagaatgcgaaagagaagctgctgaagcaactgaaagagtatagaaagataattgtgaaagaaggtcttagaatggtgaaagaacaaatcgttcaacatgccatgcagataattctacatgctggagatgccagaaagcattgtatggatgccttgaaagcgattgaatcatatgattttgcactggctgaagtggaaataaagcaagcaaatgaggagattgtacaggcacaccgcatacagacagatgcaattacggctgaaacatctggtgaagatggagagtattctgtgttgttcgcacatgcacaggatacattgatgactatttacagtgagataaatattgctaaacgcatgctggcaatttttaaagcctatgatcggcgcattgagcaattggagagtagactggaaagagaggaagaaaatgactaaaatacctgaaggttttccaaaagattttttatggggcggtgctattgcagctaatcaagctgaaggtgcgtgggatgtagacggaaaaggctggtgtgtggcagatattaatgagtttcttccagatgttgacttagaaaagaaatctaatatggaaataacgacagcttatatcaaagaagcaatgaacagtacagagcgaatttttccaaaacggtggggaattgatttctatcacacgtataaagatgacttgaaattgcttgctgaattagggctaaaaacatttcggacttctatcaactgggcaagaatttttccaaacggagatgagttggagccgaatgaagcgggtttgcagttttatgacgatttatttgatgaaataataaaaaatggtatggaaccaatgatcacaatgtctcactatgaaatgccacttcatttgacaacttcgtataaaggctggtattcaagagaagttattgatttctttgtccgttatggtcaagttctgctagatcgctatcatgacaaagtaaagaagtggatagtggttaatcaaatcaatttaattgtccatgaatcgttcaatcatcttggaattcctgaggatgcagtagaggatttgctttctgctaaatatcaaggagtacacaatgaaatggttgctagtgcattgattacaaaatatgcgcatgcacattatccagataatgagatcggcatgatgctttgtggcggtccatcttatgccgcatctagcaaggcggaagatgttctagctgcattaaaattaaatcaaatggagtatttctttgcagacgtcttacttcgcggccgctatcctggttatgctttccgttactttgatgataaaggcattcatgtaacttttggagaagatgacgaagaagcactgaagcatacggcagactttatgtctttttcttactactatacacaaatatgcgatcaagactcttacgataaggatttaggaccacacagaaataaggaactaccagcaaatccttgggggtggacaattgatcccattggcttgagaattcttttaaatgagttttatgatcgctatcagtgtccaatttatatcactgaaaatgggattggctattttgataaattggaaaatgggagcattcatgattcctatcgtatagagtattatcgagatcatattcgagccatgaaagaagcaatcaaagatggtgtggatctgcgcggttactatgcttggggacccattgatatagtcagctgttcgtctagtgaaatgagcaaacgctatggatttatttatgtagatagtgatgattatggaaaaggcagtggcgaaagaatcaaaaaagatagctttgcttggtatcaaagagttatccgcagtaatggagaaatcattgactaagattaaagagagttaaagagaatagaagataagtgctggctgctctagctgaatgctttcttttagtggaagcagaccatccacaaactcaaaggagcagtcctctataacccggattttcaggttacaaaagagcttatcgcaggcataaaacaaaaagtactcgaaaatgacttttcgagtactttttgttttgctgagagcaccattaactgacagctgcaatgctctctttagctgtgactagttagaaagaattaatctgcccgcaaagcgatcgcagcatctttttttgctgccatccgtgctgggatatggccgccgatcatggttaggatcgtgctgaccagaattaagatcaatccatggactggattcagttgtgcaacattttccagatcagtcatattgtataagaccgcgttgattgggaaagtagctaaccaagcaatcaagacacctaatgcaccagaagcaatcccaaggatacatgtttcagcatcgaagacacgagtgatatcttttttacgcgcacctaaagcttttaggacgccgatttctttcgtacgttccaaaactgaagtataggtgatgataccgatcataatcatgctcgtcactaatgagatagcggcaaaagcaatcagaacataagtgatggcatccatcaagccgccggtcaattgcgtcatggttccagctaaatcagaataaacgatttgatctttacgatctttgcctttgttgtaagcatcaagatagtccaagattttttctttggaactaaaatcatttggatagatcataatactgtttggcaagtcgctgccacctaagtaatcgattagagaatcgcgcgtgctagcatcgattttttcgttggtcataacattgatatcactgtctttttgggctttgacgattgccgagtttttgttttctttgataacttcttgggctaatgcatcgctataagcgatcccggtagaaagcaaattcatcgtagatttttctttgatacgtaaaatcccgctgatttttaattctttatttgcactgttgtcataaacagctgttaaatcttgatttgggataaagttcccagttggcaattcagtataaaaggcatcgttaagtgccaacttgactgttgttcctacgatatcatcgaaagacactttatcgccgtctttgatatcaaatcctaagttgatcaatgcgttgacgttcgtcacgttgttctcgtcaacgatcagtacaacgtcatttgctgatgcaggatattctccctgcagcaaatcatagttgtctttcaggaagttgccgttttcctcagatagttgttctgggaaggttgaaacgccgattcccgtcgaagcactcattgcggacatcatggcatttgtctgctcgttatcagctgaagcatttgaaaagctgacttgttctactttatcatcgaccttacgcagtaagttcaacgaagtcgaacgagtgtagccaatgttgttgcttaactcaggatcaattttattgagatagtcaagaaagtcctgatcaatattattgatatgggttgcccggtcagcgtcactcagttttgcggtcacttctttagtggacgggaaattctcttctttagtacgagtactgattgcagaagggtcttgttccgtcgttactttagagatcgtgatcgggaaacgggccaatgtttcagactgtgtattatcgatttgcttttggaatccggtcgataaagacaagacgatggcaatgccgatgatcccaatgcttgaagcaaatgccgttaagaaagttctgcctttttttgtccggatattattgaaagaaagacgcaatgcagtgaggaaactcatcttcgtgtgctttaattcaaattgatctttcttttgttcttcaatatgcgggttagaatcttttaagattcgaccatccttgaactcaatgattcgatccgcatactgattcgctagttccgggttatgggtaaccatgattacgagcttttcattggaaagctcttggatcagcttcatgatttggacgctagtctctgaatccaacgcacccgtcggttcatcacaaagcagaatatctgggtcgttggctaatgctcgggcaatcgctacccgctgcatttgcccaccagaaagttgatttggctttttgtgcatatggtccgcaagaccaacccgtgtcagcgcatcttcggctttcgctcgtttgacttcttttgaaacaccgcttagtgtcattcctagctcaacgttatcaataatccccaaatgactgattaaattgtaactttggaacacaaaaccgatcgaattgttccgataggcatcccaatcacggtccttgaaagatttggtcgattttccattaatgaccatgtctccagagtcgtagttgtctaatccaccgatcacatttagcatggtggtttttccagagccgcttggtcccaaaatggctacaaactcttgttttcggaaagcaaccgagacaccgtccaatgctttggtggtacttgatcctactttataatacttcttgatatcttttaattctagcatgctgtcactcttttcttgccattttcatgtttttttcatcctgtttaaaagctatcataacagttaacaaaaatcaacaatcgttattgttttgcagaagttcttatactaaactatagagaagaaaagagggagaaaatgacaaaagcgatagagaagtttgatatatcagtatttgcagaagttttctcactactgggaaaccttttgtttgaagaagttgggtttgaagatttaaaattgacaaagatggaaatacttgaattggttatcatcgcagctaatgaagggatgacgatgtcggaattagcaagacaaatcggcacatcgaaggtccagattagtcgttcgattgctggattggaaaaagctgggtttgtcattcgcaaaaccaatgaaacgaatcggcgcagcgtcaatgtctttatgtgtgaagcgggaagagaattgtttagtcgcaaaaaacaacaaattgaggatcgcttgaatgagaaggtttcggcaatgcgcccttcggattttacagagctttatcaggcgctgactacagtgattggtttgttgcggaagtatgacattttaaaagaacacgcttgctcgaacaattctaaaccaagtaaatgatccccaatttatagcaatgcaaacgattgcttcgtttgtgttatttgatgtttctattatatttctcgcccttttgtaaaaagaagaggataaagcaatcgattgcatattttgcttgtattctcttcttgtgtgtgggaaaatagaggcaacaaataattaaaggagtctgctatgaatactactgctatttatcatcgtccagaaagtgaatttgcttatttatttgaaaaagacaaaatgcacattcggctgcgcacagctcgtcaagatgtgcgtcacgtgcaattattatgcggggatccgtataccttatacaaagaagcttggtaccaacgaaggatcgaaatggataaaatcttgtctacggacttgcatgattattggcaagtgactgtaagtgcagaatttcgccgattgtcttacggcttctcaattgaaagttttgacggtctccatgttttttatggggatcatggggtctatccttttgaagagcaatacttagaaatgaacaacaattatttccggatgccttactttcaagaagcggatcggttcaaagtgccggaatgggtcaaagaaaccgtctggtatcaaatttttccggagcgctttgccaatggcgatccatcgaatgatcctgaaggcacattgccctgggggtccaaaaatcctgatcggcaagatttttttggtggagatttacaaggtgtgatcgaccatctggattatctcgtttcgctagggatcaatgggatatatttctgtccgatttttgaagcctactccaaccacaaatacgataccatcgactatttagcgattgatccggcatttggggataacgagacctttaaacggttggtggaggaatgtcataaacgaggaatcaaggtcatgcttgacgcagttttcaatcacataggagatacttcccaccaatggctcgatgtcattaagaatggtgcagattctccctttgccgattggttccatatcaatgaattccctgtcaattataaagaaggcgaagattttgaagatgcttatgatatcacgtatgatgtgtttgcatttaccccgcatatgccgaagctgaatacagagaatccggatgttcaagactatctcctaaaaattgctcgttactggatcgaagaatttgatatcgatgcttggcgcttggatgtagccaatgaggtgagccataatttctggaagaaatttcgtcaggtctgtgatgaagccaaagacgatttttatattttaggagagatatggcattcttctcaaagatggctccaaggggacgaattccatgcagtcatgaactatgcttttacagatgcaatcattgaatacttcgtcaaaggcgaaatatcaatgacaaagatggtctcggaactaaataatcaattgatgctttatcgggaccagacaaatcaagtccaattcaatattttggattctcacgatacgccgcgtctattgacattggcacgaggcgataaggacctgatgcggcaggtgatggcttttacctacttgcagcaaggggttccctgcctgtattatggcgatgaaatcggcttgaccggggatatggatccggattgccggaaatgtatggtttgggaagaagaaaaacaagaccgcgatttgttgcgcttcacaactgatttgattcatttgcgcaagagtcatcaaaaaatcctttcagagggctctttgaattggaacgtgatttctgaagaagaaggattgatcatttttgagcgggaattaggtgcgcaacgaatcattggaatctttaataccggggaagaccaactcacattgtcttgcccagaggaaattttattagatcagtttatgcagatcgaagatgagacaatgatcattgataataaaggatttgtcattgcaaaaatcaacaatgaaatcagcaataattaaaaaataaaatgaggcaagatctgttaaaacaggtcttgcctcatttaggctgattgggttttatttccccatgcacgttggaaagaatcttccccaaaattctttctactaatattatagcctataacccgtagatgtgacaaataataacagtcgaaaaataacccttttttgaaaaaaagcgaaagaagagggaattttcagattttttctttttctttctgagaatgcttatgtaaggtcttttctttttgcttaaatatgataaactagtaaaaatgtatttttattcgaggagtgatcaaatggatagagggtaccgggtagctgttgttggtgcgactggcgcagttggaacaaaaatgattgagatgttagaaaagactacattgccgatcaaggaattgattctattggcttcaaagcgatcagctgggaaaacctgtgtcttcaaaggagccactttggtcattcaagaattaactacgacctcatttattggagtagatttggctttatttagtgctggcggcagtatctccaagcaatttgccccagaagcggttaaaagcggtgcggtcgtaatcgacaatacgagctacttccgaatggatccgaatgtccctttagtggttcccgaagtaaatgctcatgctttagcaaaacaccaagggattatcgcaaacccaaattgttcaacgattcagatgatggtggcattagaaccgattcggcaacacgcaggtttatcgcggatcattgtttcgacgtatcaagctgtttcaggtgccggtgctaaggcaatggcagaattgacacgggaatctcaagcttacttgtcaggaacaccagctgatcagttggcaccagagatcatgccagcgggcggtgacaagaaacactatcccatcgcattcaatgccttgccgcagatcgatgtttttgcggaagatgattacacctatgaagagtggaaaatgattaatgaaaccaaaaagatcatggaagactcagcgatccaagtagcggctacttgtgttcggatcccagtctttagcgggcactcagaatctatttatatcgaaacaaaacaacctgcggaattgactgcagtcaaagagtggatcaaagcagctcccggagcagttctgcaagacgatccaagtcagcagatttatccacaagcactgacgagtgtcggtaagacagagaccttcgtcggtcggattcgaaaagatttagatgtagcgaatggtctgcacctttgggtggtagcggacaacttgctgaaaggtgctgcctggaactctatccaaatcgcagaatcgctgcatgaacagtctctagttcgagtgtaaatcataagtttttcagaaaagtgtagcgaatgccacgcttttcttttttttgttgtataatgaaagagacggcttaggctagggaaataaatagtgtaaaaaaatcaagaggtgaatagattggaaactatcaaaatcattcctctcggtggtgtacgtgaaaacggaaaaaatatgtacattgctgaagttggagaggatatatttgttctggattgcggtgtccgttatccagaaaacgagttattgggaatcgatacggtcattcctgatttcacgtatctagaagaaaacgcagatcgcgtagcgggggtctttttgactcatggacatgccgacgccattggggcgctgccctatttcttggagaatgttccagttccggtgtttggaacagagctaacgatcgaattggcaaaattgaccgtagcaaaaaacgaagcaacaaagaaattcaaagatttccatatcattgatgaacattcagaaatcgattttggtcatgcaaccatcagctttttccggacaacgcattcgattcctgattctgtcggaatcagcgtcaaaaccagcgctggaaatatcgtctatacaggggatttcaaatttgatcaaacagctatcccaatgtatcaaacggatttcggacgtttggcagagatcggtaaagaaggcgttctggcattgctgagcacctcaacaaatgcagaaaacccagcaccgattgcttctgaattgacgattcaagatgaagtgtttgacaacattcgctattgggaaggtcggatcattgtcgcaagtgtagccagcaatctgcagagggttcaacaagtgctggatgcagcatatcgttccggacgaaaagtagttttgactggtcaggactttggacggatcatccgcactgcgatgaagttgggtaaactaaaattaccagcagaggatttgctgatcacccaaaaagaaatgaaaaagtatgccaatgagcaattgcttattctagagactggccgtatgggtgaaccgatcaaagcattgcagaaaatggcgaacggaacacatcgtacattacggattcaagaaggggatctcgtttatattacgacgacgcctacgacagctatggaaacggtcgttgccaaaacggaagatatcatttaccgagcgggtggaaccgtgaagcaaatttcagataattttcgtgtttccggtcatgcgaatccgaatgatctgcaattgatgctgaatttaatgaagccaacgtatttcctaccaatccaaggagaatatcgtcagttggcagcacatgtggacttggctcatgaagtgggcattccgttgaagaatattttcattaccgcacgcggggatgttttagaatacaaaaaaggcgaaatgcattcagctggtgctgtaccagctgagaatgtcatgatcgatgggatcggtgtcggtgatatcggcaatattgttttacgcgatcgtaaagtcttatctgaagacggtattttcgtcgcagtcgtaacgatcaaccgtcgcgaaaagaaaatcattgcagcaccgcaaatcacttcccgcggctttgtttatgtcaaagcaagtcgtgatttgattcgggaaagtggtgagatcgttgcagagatcgttgaaaaacatttgcatgatgaagagtttgaatggagtaaattgaaacaagacattcgagatcgcttaagccgcttcttgtttgaacagacaaaacgccgaccagtgatcttgcctgtgatcatggaatccagtcaaagaaatcgatcacgcaaataaaacatccagaaaactaggacgccagctacaaacgtcctagtttttgctttgatttttgtggtgtctctttagatacatagcgcagaaatacgagaacattgtccgatcgataatatctaggtcttcattgacagggtgttgtctaaagcaagtgttccaataaccaaacattgaaattgctcctgttttccggtgcggattggtggggtctctcaaggcgtgtcagttatttttgttagtctggctaatttgacttgtccgaatgctggagtgatgtctggataaaaaacaattccacgaagaaactcgtgttaaaagaaaattgattggatcgaaaggatggttttgagtgaaaagttatcaagaagatacgcttgtccagcagagaaaatggtggatcttgattgctgttgcgatgttcacgtttatgtctacattagacggcagcatcgtgaatattgcgttgccgacgatatcggcaaatatgtccgtacccatgaaccaagcggaatgggtcgtgtcggtttatttgatggtggtttgtgcttgtttgttgctatttggtaagattggcgatagttgggggaaaatcaaggtctttcgtctcggcatgttgatttttaccatcggttctttattgtgcgggttcaaccattcgttggcttttttgctctttgcacgagtcgtccaagcgatcggtgcaagtatgacgatggcaacaaatactggaatcattacggaagtatttcctattagtgagcgaggacgggcactggggatgatcggcgctttcgtgtcgctaggatcaattgctggtccaggactaggcgggatcatattgtctcatttttcatggccttatattttttggatcaatgttcctgtcggaattctgactatgattgccggggagaaaattttacccaaagatatcaccatgagccgcaactccatcgataaaagtggatttggtctattctctgtggcgatcttgacctttttcggtggaattttcatcggtcaggagcaaggcttcttgacatggttgccattagtattgattttcgttgcaatcattgcttttattgcttttattcaagtagaaaaacgggtggcgatgccgctgattactttcagcattttccgaaataaaatttttacgttaagtttgtttacggcacttctgatcttttctgctaatttttttgttaatgtcgtgattccattttatctgcaaaatgcccgtgggttgactccaagtgtagccgggatgttgatgatggtctttcctttgatgatggttatcggatcgcctatcagcggttatttgacagaccaagtcggtccagaaatcttggtgttgattggcttggccttactatcgattacccaactgatgtacatgtttatgaaccagcatacacctatttggtattatgtggtggctacagcaatcatgggattaggaaattccttgttccaatcgccgaataataccatggtcatgagcagcgtgaccaaagaaaatttgggagtggccggtagcttgaactcttttgctcgtaatctaggcatggtgctagggattgcaatgtccacaacgattctatattctgcgatgagcagtgcctatggtcagcatgtgacgacatatatcaatggacgaccagatatcttcaattatggaatgaaagttactttcttcggtgcgtttcttttatgtgctgtggccctattgatgactatgtggcgtatcaaaaaacaaggtggcttccagaaacattctctgtaagctgcgaacctaaaaaaactgttctagttcttttttctgaagactagaacagtttttttgtgatttcttgactaagagaagaataacgtcatgaatgaaatggatacaccgaattgattgtttggaattttgtattagtctgttataatagaaaatattagtctgtattacttatgaataggaaaggggtaattgttgtgaagattacttttcatggacacgcggttctttcgatcgagttggaagatggacaaaagttgttgtttgacccttttataaatggaaacgctatgactgatctggatgcagaaacagttgatccagactggctgctgatcactcatgggcacagcgaccatgtaggagatatggtggcgattgccaaacgtacagaagcacctattatcagtgtagtggaagtttgtcagtatgcaacaagtaagggagtaacgaagactcacggtatgaatatcggcggctcatatacttttccctttggcaaggtacggttcgttcaagctcagcacagttccggtctggaagaagacggcaagatgatctatatgggaaacccagcgggaatcattttagaagcggaaggcaaaacaatatatcacgcgggggatacagccctctttggtgatatggcactgattggcgaacaatttgcgatcgatgtggctttcttgccgattggtgataacttcactatgggacctaaagatgcagccgcagctgcccacttattgaaagcaaaaaaagttgtaccagttcactacaacacattcccactgatcaaacaagatcccgccgcttttatcgacttgctgcctgagggagtaggcaccgttttggctgtgggagaatcgattgattgttgaccgtctgattgacggattttattaactaggagaaaattatggcgacgaaacatgacttgattttagcgcatatcgaaagtttgccggtaggagaccgtatttcagtacggggaatcgcaaaggatttaggtgtcagtgaaggaaccgcctatcgggcaatcaaagatgcagaaaatatcggtctggtctctaccattcaacgggtaggaaccattaggatcgagcgtaagttaaaaaaacatattgaaaaattgacctttggagaagtcgtacaaatcattgaaggagaggttctaggaggcgcagccggtctagataaggacttgaataagtttgttatcggtgcgatgaaagaatcagcaatggaacgatatatcaccccgggatcgctcgtgatcgtagggaatcgaaatgaagttcaccaattagcattagaagatggtgctgctgtcttgatcactggtgggtttgaaacatcagaagaaaactgtcgtttggccgataagctggaactgccaatattgcagacgacttatgatacgtttaccgttgcaacgatgatcaaccgggcattgagtgaccagctgatcaaaaaagatattatgctcgttagcgatatctatatgccgctggaaaaaacaaagtatctgcatacgtttgacactgtcaaagactataaacgtctttcagaagaaaccaatcattctcgctatccggtagttaacaagaacatgcgcgtggttgggatcattacggcaaaagatgttttggaaaaacccgatacgcaaatcattgaacgaatcatgactcgtgaaccgcgagtcgtgaaaaaagagatgagtgttgcttctgccagtcatcaaatgatttgggatggcttggaagtgatgccagtagtagcagatgacttatctttgatcggaatcgtgactcggcaagacattatgaaggcgatgcaactagtccaaagacagacccagatttccgatacgatctctgatcagatttctggtcagatccaaatcattgaacaagattttgaaggcaataaattggcacagccaaactttcgtttcgctgtgactccacaaatggtcaatgaagtaggaacgatttcttttggtgtgctcagtgaagtgatcgccaatgctgccaaacgaacgatgcaagtcaatcagcggcgaaacagctggatcgaacaagtgaatctacactatttccgcttgatccaattagaaagtgagatcattattcagcccaaaattttggagctggggcgccgatctgctaagatcgatattgaagtctatatcgaaaattccatggtagctaaagcaattgtcgtctgccaagtaatggagcgcccttaattcgaacagcagtcatcagataaatgcttagaaaatggagatatgcaatgaacgtacaagaggaaatattgacagcaattaaggaatatcagacaattattattcaccgccatcagcgacctgatccggatgcactagggtcacaagttggattggcagaaattttacgagctagttttcctgaaaaagcgatctatcaagtgggagggcctgttgaagggctagactacttagcagaaatgcaggagatttcggatgaagtctacaaaaatgccttagtgatcgtgaccgataccgccaattcaccaagagtcagtgatcagcgctatgccaatggtgcaaaattgatcaaaatcgatcaccatcctaatgacgaaccttatggagatttggtctgggtggatactactgctagcagctgcagtgaaatgattacggcattctggaaaatgttcgctgaagaacttactatgtcgcaagaagctgcgcgcctgctttatgccggaatcgtaggggatacgggtcgtttcctgtacccagcaacgacctccgcgacattgcgttacgcagctgatttgttggattatggttttgatgcaccaaaaatcaatcgtgagattgatcaggtttcgagagcagtggctcgtctttccggctatgtctttgaaaatttagaagttgattcactaggagctggcaaagtgattctgacaaatgagattcagcagcgttttggcgttgttgattcagaaacatctgctatcgtgtccttaccagggaagattgaagatgtcttagcatgggcaatttttgttgagcagccagaaggctattatcgggtccggatgcgttcgaaaggacctgtgatcaatgagatcgccaaacgtcatcatggtggcggacatccgcttgccagcggagcgaatgcagcggatctggaagaagtggcagccatctatcaagaaatccagaccgcagtttcagcttttcgagaacaagcatagactttattcgtcgtgatcagtgttcttttgcagaagaaaaaaccaacagcgaggaatcttaggacttgctaggggaatgatcggtgagtttttgattgtagtaaataactgtagtaaaaaattacgcaaataaaaaaagcgtatgactcgcgggtcatacgcttttttgcaagttgcaacaggcgagatcagccccgcaagtcgtcaagaaactcggttttactagccgtcttttcatctttcatcttgatgactttagccggggaaccagcaactacagcccctgccggtacatcttctgtgactacagatccagcagcaaccacagcaccttcaccgacacgaacaccttcaaggactacggcattggcgccgatcaacacatgatcttcgataatcactgggctagctgaaggtggctctaagacaccagctaaaacagccccagctccgatatgggcttttttaccgacagtagcccgggcgcctaaaatcgcccccatatcgatcattgtttcttcgccgacaacggcaccaatattgatgaccgctcccatcatgatgaccgcattcttctcaatgattgcttgatcacgaatgaaagcccctggttcgatccgagcatcgactgttgttaagtccaacagagggatcgcagaattccgacggtcattttctaaatagaaatcagtgattttatcttgattggccgttagaaaatcagctacttcttgactgtctccaacaataaagtaaaaggagccagccccaaaaattttcagtgtctcggaagaacaggtagatagatcaccattcaaatagactttgactggggtctgcttattggcttctttgatgtatttggctaattgataaggatcagaaaattgtaattcagtcatacgttaccacctttacttgtcaagtagattttccatgtcatatagtccagcaggttgttttgcaagatattcggcagccttcaacgcaccattggcaaaaatatcccgtgataatgcggtatgtttcagctcaatgatctcgtctgctcctgcatagatcaccgtgtgttcgcccgggatcgtgccaccgcgaacagcgtgaatacctaattgttttcgatcattggtcagatcgttgccagaacggccataaagatattcttttggttcttgacaactttcattgatgctgtctgccagtaacaatgcagttccgcttggcgcatcgattttttgattgtgatgtttttcaatgatttcaatatcgaaatctgcttccaaaggtggggtgatcgcttttagggctttgatcaatacattgatccccacggacatattcgcagaataaaaaacaggaatcttttgagcagcggcgaccattttttcttgggttgcttgacttaaaccagtcgtagccacaacgatgggcagttggttggcaacacagaagtcaaggaggcctgctacattgctatgatgtgaaaaatcgatcaccaaatcaacaggttctttgactgcttctggtgcagaatagattggaaagtcgccagttgcttccgtgtgacggtctaatccagcactgatcacaaattcagcatgtccagcaatcatgtgctgcaaaacttttcccattcgaccattggcaccgctcaataaaatatgtctcacttgattgcctccttataaaagcccataagcggacatttctttttttagacggttgattgtttctttctcaggcggtcctaatggcaaccgatagtgcaagtcagactttcctaataaggaaactgccgctttgatgggcactggattgacttcactaaaaatcgcatcgatcaaaggtttttgtcgtaactgctcctgaatcgctgcttgaatatttccagaaagaaaatctgccaccaaagtcgctgtttgtttaggggcaatattaccgatcgtcgaaatcacaccagaaccgcctaatgctaagattggtgtgacttgatcatcattgccggaatagagagaaaattcatcatccactagttgcgcgatagacgcaatttgtgagatatctccactggcctctttgattcctttgacattcggaatctcttttaattcagcaaccatgtcgtaagtcaagttcattcctgttcttgatgcgaccgaatataagatgacaggcagttcaacgctttgacaaattgccttgtaatgagtaaccaaactcttttttgttgctttgttgtaataaggggttacaaccaataatgcgtcggcaccgacacgctctgcttcttgggaaagatggatcccatgttgcgtattgtttgaaccagtgccaccgatcacaggaatgcggcccgcagcctgcttgacaaccgcctcgataacagcaatgtgttcttcatcgttcaatgttgaggcttcaccggtcgttccacaagcgatcaatgcatcgctaccttgctggatatgccactcaaccagtgacttcaacttgtcgaaatccaccgaaccatcatgaaacatcggggtgatcaatgcaacgccagaacctttaaaaatcgtcaaactactccacatcctttcaacctttttattctttctctaattgtactaaaaatcaaaaaattttgattatttatactatagattattcgaattatatactataatattatccaatatcaatggaaatgtggatatccatacattttcagccgatattgctgatcaaatgaaagaaaggtgcccacgaatgcaattatctcaagcagtaatgaaattaaccgaagacgtggttcgttttcgacgggaactacataagattcccgagttaggattagaagaattcaaaacgaaggaatatttgcttaaacagttgcagtctttcgggatcaaagaaatttatccggttctggataccggattgatcgctgtttttcgcagtgaaaaaccagggaagacgttagcattccgcacggatatcgatgcattgcctatcaaggaagaaacgaatgctccttttgcctcgcaacatctcggcaaaatgcatgcttgtggacatgatggacatatggcgacgcttttaggttttgcaaagtacttatccgattacccggaagctgttcgcgggaccattgtgttgatttttcagccagcagaagaaggccctggtggtgcgcagctaatgattgatgaaggaatcttaaccgattttgcgattgatcagattatcggtctgcatgtttttccagactatcctgaaggtgtgattgcttgccgcaagggaccaatgatggctcgaaatggcgagatcacgattcgagtcctgggagaaagtgctcacggggcccaacctcatcaaggcagcgatgcgatcttagcggcagctgcggtcattcaaggtctccatgcaatcgtttctcgcaacattagtccattgtcttcggccgtcattacattcggcaagattcgcggaggagatgcagaaaatattattcccggagaagtcgtgttgaacggaacgatgcgggcttttgaagatggggtctatgaaacattgacgcaacgagtaaaattggcggctgaagagattgctaaagggtatggctgttcagcagaagtttctttcgaacacttgtatcgggtggtagacaatgatccagacatggtagatgctgttcgggatgttgctggcgacagttatatcgagacaccgccgtacatgttagcggaagatttctccatgtaccaaaaagagatccctggtgtctttttctttgtcgggactcgggatgaagaaaaagggtatacctatccgctgcacagcagcaagatgaattttgatgagaaagtcttattaggaggcattgagtgctacctgcgattgattgaaagattgaatcagagtcaggtactaagagaggagcgcagtaatgatcaaagagattaaagacaatcacctgttttgggatggatgcgatacagtggcattagcaaaagaatttggcacacccttgtacgttttttcggtgaccgagattcgcactcaatgtcgtgctattcgcgaggaatttctgtctcgctatgaaaacacccgagctgcctatgcttcgaaagccttcaatacactagccatgctgcggttgattgatgaggaaggcctgtctttggatgttgttagtggcggtgaactatacacagccatccaagcaggatttccagcggaacaaatcgaattcaatggcaacaataaatctattgatgaattggcattagcgatcgattatggtgtaggtcggatcattgtcgatggcagtcaggagatcggtttgattcgagcgctatgtcaagagaaacagcggaaagcaaaagtgatgttccgaatcacaccagaagtgaatgtccagacccatgcgtttatttcaactggacagaaagattcgaaatttgggatcccattggatgaagagattttatttcctttgattgaagaagtgattgacgcaccggaaatcgatttttatgggttgcatttccacatcggaagtcaattgtctgacaatcattcccatattgctgcgacagaggctgcgctagcattagttctagaaatccatcatcgatttgactatactgttaaagagttgaatgttggcggcggatttggtgtccgctatacggaaaaggatattcgtcaaccctattcttactttttggacccggtgatggcgacgattgaaacgttttgccaagcgcatcagctccaacgtccgactgtggtgatcgagcctgggcgtagtattgtagcggaagcaggtatcagtctgcatactattggtacgatcaagacattgccacagattcgaacctatgccagtattgatggcggcatgacagataacattcgtcccggtctttatcaagctgaatatacggggattctagccaatcgggcagcagaagctgccacagagacagttacgatttctggcaaggcttgtgaaagcacggatatcttagtcaaagatctgcaattacccaaagtagagacgggagatctttttgcgacttttgcgacgggagcatatggttattcaatggctagcaattacaataaacttgcgattccagcggtagtttttgttgaaaaggggcacgcggaattggtggttgaacgtcagactttccagcagttgattcaaaatgaacgtatcccttcgtttttgatgaaagaataaaaaaaagcaggtgaaatcatggaaatcgtttataccaagatgcaaggtgccggaaatgattttattgtgatcgacaatcgtcgctataatttttcttcgaaacagttggctaagttagcggctcaagtttgtcagcggaaattttcaatcggcgcagatgcgttgatggctgtcgatcatcccgaaggaacgggagatttccgcatgcgtttttataatgcggatggtacggaagcagaaatgtgtggcaatggtgcacgctgtatcgctcgctatgcttatgaaaataaggttgcttcagaagcaatggtgatcgagaccgttgcaggacctgttcctgcttggcgattggatcggcaacagtacaaagtgacgttaaatccccccaccgttgcgaagtttgaccaacctttcgctgacagagaggttcctgtcgttgattatatcgagttaggtgatccaggaatccctcatgcggtggtgaagtatcccggtctgcaagaaacatccctcgatgcattgacagatttagcacaacggattcgctattggtcagcatttcctaaaggcgccaatgtgaatttctacgatgccgattcagctggggagctcgttgtccgcacctatgaacggggagtcgagggctttacgtatgcttgtgggaccggctctggggcaactgcttatgcggtggcgcgacgccgggaacaaacgcaagccaatcttgtgctgcatgttttaggcggagagctgcgagtcgaagttgcatcagaagagctccaactgattggggatgcgatttttgtttctgaagggcgtattttagacgaaaatctatttttagactgagggtggtcttgcgacggaattatcctgttcatagaatcatttaggcgacagttcttatggaagccttattcttagaagccatctttagctagaactgagaagatcatcaaatgcaatcgatagaacttagtttgttctatcgattgtatttttttgtgcaggatattgcaggatagtcagaaattttgtatgctacagttatatttattttttcacgatcgtgctcgatcgttgaataaacacagaatacatcactatgaggagtaagaatatgtctcaaattccaaattgtccagtttgtcaatccgcctatgcatatgaggatcgcggcttgtttgtctgccctgaatgtggcaatgaatggcaggaaacagaagaaactgctgctgtcgtcaaagatgccaacggaaatgttcttcaggatggcgatgccgtgacggtcatcaaagatttgaaagtcaaaggtgcttctggtgccatcaaacaaggaaccaaagtcaaaaacattcgtctggtagaaggggatcacaatatcgactgtaaagtcgatggtttcggtgccatgaaattgaagtcagaatttgtaaaaaaactttaaaaacagaatcttccatacctcttcataatattttcatccatttaatggtaaaataaggtcaaagacgaaagggagggatttcatcgtgtatggaatcggtggatacggttttggttggttttatgatccaacattcattttagtcattatcgggatggtgatctcgatggcggcttcagcatacgttaaaagcacgtttagcaaatacgataaaataagcagtagaaacaatatcaccgggaccaaggcggctcagtatattttggaaagccaaggcatcaacaatgtcggcgtccaagctatcgcaggagatttgactgataattataattccggcaacaagatgctaagtctatctcaagcaactgcacaatcaacttctgtggcagcaatcggagtggcagcccatgaatgcgggcatgctgtgcaagatgctaaagggtatctcccattgcgtatccggcatgcgatcgtcccagtagctaatattggttccgcggtgtcgatcccgttgattttgatcggggttcttttgagagggtccttcctaatcaatctggggatattagcattctcgttagcatttattttccaattggtgacgttgccagtcgaatttgatgcttcaagacgagcgttacggattttagccgatggcggtctcttaacggaagaagaagtaccgcaggcccgtaaagtattgtttgctgcagccttgacttatgtggcagctgcagttgcgacattgctgcaattactacgtttgattattttattcggcaataacaatcgccgcgactaatgaaaagaaggagacttgagaatgctcaagtttcctttttttgaaattgtcgttataataaaaagaaaaaggtggggaataaatgaaaaaagaaacatggctgcggtcgctttttgcgttgatcggggtagctatcatcggttttggcgcctccttgcttcgcgtaggtggcgtcgggctggatccgtatacagctgccaatattggaacaggtgaacggttaggtctttcattaggtgtttatcaattaatgatcaatctcgttttgttgatcttgattttcttttttggtcgtcggcatattgggatcggcacagtgatcaatatggtcttgacgggcttttttattgatttttatacgaaaatctttgaacttttcgcagtttctccggaaggttggctgcaaaaagggctctttttagtgatcggtattctgttctttacctttggtgcttccttctatatgtcagcaaaagtgggaagtgcgccttatgatgcgatcgcaccgacgatcgttgatcgaacgaaagcgaattatcgggtcgtcagagtgatccaagatgtggcttttgcgacactcggctggatcacaggtggaccgatcgggattgggacatttatcagtgcctttctagttggtccgctgatcaagttctgggatgattacgcctcagtgccgttcatcgaaaagaccatcaagaaatctttatttaaatgagcgcggacctatcgaaacaacaatgataagtagcagatgatagataccagcagtacaaaaaaacactgtagatatgctattgatcgatttcaacgatacctacagcaataacgaaagactgtgacaaaatcagcagtgaatgggcaatggatagcgtaaatcgttttcgaacgaacgatcctttgctgacctattttaggtttgatttccttctgttgatttttgtcacattttttttcaaaattgcctgacgctacttgcacaatcgctgagcactcgctatgataagagagcttaggagggatcatcttgaaattaccagcagcattcattaccaaatatcagcagttactaggagccgaagcggcggccttttttactgctttagaaacagggcatccagtaaaaggatttcgcttgaatctgttgaagccacaagccgtctcgatgctggaaatgtttggaccggataaaagtccagcaccatacgcaatgaacgcctatattggagaagtcaaagggaaatcactgcttcatcaagcggggtatgtctacagtcaggaaccaagcgcgatgatcgttgcgacgatcgcagatgcacaaccaggagaaaaagtgctcgatctttgtgcagcgcctggagggaaaaccacgcaattagcaagtcagatgcaaggcaaaggtttattggtttccaatgagatttttactaaacgcgcaaaaatcttatcggaaaacgttgaacgatgggggatcagtaatgtggtggtgacgaaccatgcgccgcaagaactgacgccgcattttccacaattttttgacaaaatcgtggtggatgctccttgctcaggagaaggaatgttccgcaaagatcctgtggccatcgcggaatggcaagctgattcgccactgcagtgcgctcagcgccagaaggagattttggctgaagcggttgcgatgttaaagcctggcggacagttgatctactctacttgcacgtttgcacctgaagaaaatgaagccatcattgaatggctggtctcagcatatcctttttccattgaaccgattgaattggaaaatgtgtctcatggacgccacgattgggcaccgatgaacgacattgaaaagacgattcggttatggcctcacaaaaatcaaggggaaggtcattttgccgcaaagctgacctatcttggatcggagaacatagccaaaccaaagaaaaccaaaaaaaccaaaaaagcttctgggattgattctgtcacgcgatcactttggcaatctttccaagaaaactatccatttttaaaagagactgctgccgatatccagctttttggggatcatctgtggttagtacctagtgaattaccatcactaaaaggggttcgcgtattacgtccagggcttcacgtagggactgtgaaaaagaatcgtatcgaaccgagttttgcattggcaatggcgatcaaagaaaatgatgaagcacctttcttgtcaattgagttagctcagtggcagaagtacgtggctggtgaaacgattacggtacctggaaatgaaggctgggtcgtcttgaaggtggctgaggtcccgattggcttcggcaaacaagtgcaaggtgtggtgaaaaacttcttcccgaaaggattgcggttcactctggaataaacgaaatagtatttttatttgatcggtcgtgctatcatagaagtagcaaataaagggagctgatcgatatgaaaacatcaacaaaagtaacgattggattaagtattgcggcaattgctggcatctcaacagcagtcgttgtctcagacaaagtcgtgaacaaagtacgcttcgcttgcaaccgtcacaaagtgaaaaagtttgttgacgacaaatttaatggcaacgaaaaattattaggtgtcgtcgatgatttgacggataaagatttagatgcattgctcggcgtcatgaagaaagtcaaagacagccgtcataaagtctcggtttatggagataacgtcaaagatgcaacagagaatgtcaaagacaagttgactagctttattgatgcagtcttttaagctaatatctccttggagaaaatgctgttagaagcggccagaagatcgttgaaagaacctgccagtggttgtcctgccatagcagttgtttgactaggcttcatttggcgcttcttttttgttcagagaaaaggaaaataggaattgggagccatagcaactggaacaggtacggctactgaatgactgcgttaaaaaattgccagagcttttctatagagtcagtgtcagctttccatgtttatcccaattgagaattgaaaggaatcattttgaagaaagaaagtaccctcacacaaagtgaaaaagaatattttatgcgtgaagcactgaaagaagcgcaaaaagcggaagcaatcgccgaagtccccatcggggcagttgtcgtcttagaggggcaaattattggccgaggacacaacttgcgggaaaaacagcaagaggcaacagctcatgccgaaatgtttgccatccaacaagcctgccaagccatcgaaagctggcgcttagaacaagcgcagctatttgttacattggagccttgtcctatgtgtagtggtgcaatgatgctggctcgtgtcgaagaagtttactttggcgcctacgatccaaaaggcggtgctgccggttctttgctgaatctgttggaagatgagcgtttcaaccattggtcctacgtagaaggcgggatcttggaagaagcgtgcgggcaagtgctaaaagatttttttcgggcattgcgccaaaagaaaaaacaaaaaaagtctggtaatctatagaaaaatacgttatactaaattttgccgaaaggctaggacaatggaggtcttgtgaagcgtgtcagatccggaaggaagcagcactaagcaggagtctccatgtgtctgattttttttaattaactattagctgatgaaaatcagctttttttgttgccaaaaagcagaactgcgacttctctaagtgagttcttctgagggggtagacaaacgccctttttttatatccttcattcaataataaataaaaaaaggggctgtgccataagtctcctacaagtgaaatccgaacatgatatagtattgctcttgcggtgcaggggttcctcgtcgcaaaagtcagaggaatctatcgcaatagaatatgatacggtttcacttgttggatgatgacttatggcataacctcttgctaaaaagtaactactggaatagttatctgtctaatctcatataaattagtggatatggattgccttgttcgtcaaacgctgtttttttataaacttcaaatcccatgtgttcataaaaatcttttgcaagcgggttttgttcattcactgctaaatcattaaccaaatatttttctatgccgtatgtaagcaattctttgcctaacccttttcctctttcttcgttagcaataaaaagcatttcaagatgttgctccacgatccccataaagccaacaggtgcttgattttcgttttctatgagaattaaataggggatttcttttaatgcttgtggtacatacgtcttgatttcttctatttcatgatctgatagaaagagatgcgttgctcttacagcactttcccaaatggttaatagctgttctatcaatggtgccgttctttcttttacctctataattttcaagttcttgacctccaaaacctccgatttttttaattatatcaaagaaaaaagataaaaacgaagtgctgtatatccaacagatatacagcacttcatgacacgaatgaagttagttgcagtctgagaaccactacacctataagcgaggggttctattattgtttgtagcagatcgaattagatatagtcttcatgccgagggccattcctgcggatctcttcttgttcttcagcggataattcagtgaagatatcactaccgtctaaaaacgtgttccaatctgtccccatcatctcatgaagtgtctctggatcctcgtcggataaacgatgggaggtctctccatccaccgtttgttgtttctcagaggaagaagtgtacttgtggccaaaaagtttttcccactctgctcgtaactgttctaacatcgaaatccctcctttttttttattgtagcacaaggtctttagaaaggcggtccaaacgctggaaacaaaacctgaatcgaaaagcatccctctggtacctcgcaaaaattgtgctattctaatagtagttggaacattaagctgaagacttatcaaatagccgacagcaaatgggtgagaagagggataagatggaaaaaatcacgctagtacacacgaatgatttgcattcacatctggagcattggcctaagatccgccgttatcttaatcaacggaagcaagaagcagattcgagtcaagaaacagtgatttctttggatctaggagattttgtggatcggtggcatccattgactgaagcaacgaacggacaagccaatattgagctgatgaaccaaggacactatgatgcagtgactattggcaacaatgaaggtgtgggaaattccaaagaagagcttcagcatctttatgatcaagcggagtttcctatcttattggcgaaccttttcgataagaatgatttgaaaccaccaaaatggcggcaggattaccagatcatcgaaacgaatcaagggacgaaagtcgggctgattgcttttacggcaccctttcctttgacctattcaccaaacggctgggatattcgtgaacccttggaattgctgcctttattgatcaatcatttgcagccccaagtcgatattttagtcttgatgagtcatttgggaatcaatgcagatcgagcgatcgcggctgagtttcctcagttggatgtgattttaggctctcatacgcatcacttattcgagaccggcgaaatcgtcaatggcgtacaattggcagcagcggggaaatttggcttttatattggtgaagtaacgattacgttagatgatcaagggcaaactatcgagcgttctgcccgagtgatccctacagagcagcttttagcttttccgcaagatgaagaagagattgctggttatctttctattggtcatcgtttgctgaaaacgaaacaagtcgcacaacttccgtgggcgcttcgttgtgaagggaacgaagattcgattatccaagaagcattggcggcgctttgtgttagaggacaaacggaagctgctgtgttgaatagcggtttgtttttaggtgatttaccggcagggcgcatcgaccaggatcaactgcataccatcttgcctcatccgatgcacttgattcgagtgacattgaagggagcagatgtgatccgttttgttttagaaatggaaaaaaatcggcgctttttacggaactatccaattgttgggatgggatttcgtgggaaaatatttggtgaactggtttataaggggatctcttatgatgccatcaatcaccaagtattgtggcaaaacaaagtaatcaatccggtggaagaataccagatcacattagtggatcattatttgtttattcctttttttcccacgatcgagatagccggacgctgtgaatttttatttccagaatttattcgtacggtctttggcagctacttagcacataaatatccgatccagtaatgaaaaagtcggaggggaatctgatacaagcacgactatcattacgtattaaaacaaggtataatagacaacaggtggtgaaaagatgaccgaaaaacaaacaattacagacgagatcacttcggtactcgaggagatcatcgaagaaccagagaaacagccgcaaaaaggcgaactggttacgcttgttaatgaagatgaattattgatcggtacacgccaatacaaattggtggtagattatcgcgaaggatttgatccccaaaaattgggcgaacggtacagtgaagtattggctcgctacgattacatcgtaggggattggggttatgaacagttgcgtctaaaaggtttttttgacaaagacaatcgcaaagcattaccggatcagcggatcgacatgctagaggattatttatatgaatactgtaatttcggttgcgcttattttgtaattcaacgagttggcggcaagaaagaaaagagtacgacccgacgccgtaaaaagaaaccagcagctcaaagcaatcaaacacgtccggcacacatcgatgagaaacaagaagttgtttctcaaaaacaggtgaagccaacgattaaaaatcgaaaaccaaaagaaaaaaaggcgcgatcgacagaaacgacagtgaaaaaaacaaataaaaaagaattcacgatccgtcaacgggaagagtaatttatgaaatataagggatatttgattgatttagatggcacgatctatttagggaaagagccgataccagcaggcaaacgcttcgttgaagctttgcagaaaaaggaattgcctttcctttttgtcacaaataatacgacccgcagtccagaaacagtcgcacaacgattagcggatgaattcgccattcatgtggcgcctgcaacaatttatacggcaagtttggcgacgatcgactttatgaaagaccacggtcgcggcaataaagtctttgtgatcggcgaagcaggattgatcgacttgattttagcggccggttttgaatgggatgaccaaaatccggattatgtcgtcgttggtttagacaatgatgtcacctacgaaaagtttgtcttagccacattagcgattcaaaaaggggctacctttatcggcaccaatccagataaaaatatccctaccgaacggggattgttacctggagccggttctttgatcgcaatggtggagactgcgacacagacaccgccgattttcatcggtaaaccggaagcaattattatggacaaagccgtggcacaccttggtttaccaaaagaggaagtcattatggtgggagataactatgagacggatatttgctcggggattcggaatggcattgattccctattggtactatccggttttacaccgaaatctgctgtgcctcgtttaccggaacccccaacttatgtcattgattccttagatgaatgggattttgaccaatgagaaaacaagtatggatcgagcggctagggatgctgtgtttgtttttatttctgatcagcttagcaattacggtaacgatcaattttcgctggctatatcattttgatattcaacagttgaatattttagattataccgacatttcaaaagaagaattgataaaaaattatgggttgttgctggatttcttgaacaatccattgaatacgacattagctttgccagattttccgatgtcagcggcaggagctggacatttctatgatgtgaagaaactatttttattaaactatggtgtactgctcgtaacgttgatccccagtttcatgcttcttagatctttttggaaaaatgaccagcgctggcggttgttgcgaccattgcagtgggggatgctgctgccgattttctttggtttcttgatggcaatcgggtttgatcgattttttgtgacgtttcatgagattttcttcaataatgacgattggctttttgatccagtaacggatcccatcatcaatgttctgccggagacgttcttcatgcactgttttattttattttttgtactgattgaactgtttttctttgtgatttactggtgggcaaaacaaagtcaaaaaaagactatttcataagtgagaaaagacctagaggatagcgggaacgtcagtcatactggcgttccttgctagtatcgcgtaacgatttacacggtagtcccttcaggtgtttcagacttgtgggatagtcttttttcgatagtagctgatttttacaagtttattgagtgatgtaatgagacttgcttggatgctggtgcgccaaacgactagctgccgaagctgcgattgcacctacaatatcatctaagaatgtatggacccgggggccttcatgactgtttaattcttttaaaatacctggcttcactttatcgatgtagccatagttggtgaaaccgatcgaaccgtagacattgacaatggaaagtgccaaaatctcatcgataccatacaacccttcatcatctttgacgatttcctgcaatggatgcaaaaggctgttttcttctgccaatatatctaactggataccagtcaaaatcgtgttgtgaacctcacgtttactgaggactgcgttcacactttcaatgcacatatctaatgtaataccttcgatataatctttttgtaaaaataaaacaagttcgccgatatcctgaagtgatacgccgcgctctgaaagtagttctcttgccttatcttcaagtgttttattctctaataccatgtgattccctccaattcttttttcttacttctatcctatcttatcttgcccgtggaatcaaaaaataccgacgaacagcaacgtagtcgtttctgaactgtatgaaaaaaagtcgcagagaaatcctgcgaccgttctttttatagcttttttccttttttatactagctcttttttaagctgttttttaatatagtagtttttgcttttttggtttttttaatatagtagtttttgcttttttggtaagtagctttttttgcaattgttgttttgcggcaactgcccaagggtgggccactagcaaatcaccagcaaacagccagtcaagataacataatgctgccgcttctaaagagttatcaagtgcagccagtagctcctctaaaaaaggtgccgcatctgcgcgatcccattcgattttatctgctaggaaaacaatgagatccagctttgaaaaattttccttaagtgtcgtgtggcaggtaatggcagacaaaatctcagggtcagtgatcccaaagagctcttttgccaaagtagccgattgtttttgatgcagcaataatggtacttttctttcttccggcactatctccaaaccgtaatattcttgaaatgcgagacgttcatcattgggaatgaccacgctgatatcatgaaacaatccagcaatcgttgctttctggcagtcgccaccgaaacgtttggcaagttgctcagcggcattggctacttcgagatgatgttggacagtcgatacttggtcaaaggcttctaagtaaacacgcatttggtttgcaagggacgcatcaggtaaatcaattttataccgactcagcatggtctactccttgaacaaactagtgctgtgggcaggttgtgtccggtttttaggatcaatgtaatgaagcgcattgttgacggcagtgggggcttccccgaaaccagtagcaatcaaatctactttgccatcgtataagaccacatccccgcaagcgtagattcctggaatggatgtccgcatatctgatgtaacgaatacgccttgtcgagtgctttttagtccccactctttaatgttcaaagtcgaagaaaaaccgtaattaacgatcaaagagtccacttgcaaggaaacagattcatctcctttgacttgctgcaaagcaatttcagttagacgtttttctccactgatatcctggataacatagggagttagaatgttgacagaagaagcgcgcagtttgttgacactatgttcatgcgctcgaaattctgggcgacgatggatcaaataaacttcactagcgattggttcaagcatgagcgcccagtcaatcgctgaatcgccacccccagcgatagcaactttgcggcccgcatacttcatcaagtcagttacgaaatagtcgagtccattgccttcaaaacgttcactgtcgggtatagacagttttcttggctggaaggaaccattgcctaaggctaaaatcactgctttggaatagtgattgcctttatctgtgatcagttctaggtagtcttcgtgcttttcgatctgtaagacggtttcctccaaacagtattgatgattgaaggtagtcagttgcttttcaagattttgaaccaattcaccggctttgatctttggataacccggaatatcatatatatatttctcaggatagagcgtggccaattggccgcctagctgaggcagactgtcgatcagtttggtttttgcgttgcgcataccggcgtagaaggcagagaacatgccgctcggcccagcaccaacgatggtaatatcatatatctccatagtgcatctccctctgttgattgattattctacagtatcacctggacgaatagcttcattatagcaaaaattgtcttaactagcattttttcatttttctgctatcattgttttagtatttagtataaacaaggaggcgttaagtgtgtctgaatttccacagctacatttaaaagaaacaggtcataaagcagttatcaaaacgaatcggggagatatcacagtagtgctctttccagaattggccccaaaaaccgtgaaaaacttcgtcgaacttgcccaaaaaggatattacgacggtatcattttccaccgtgttattcctgattttatgattcaaggcggcgatcctaccggtactggtatgggtggcgaaagtatttacgggggcagcttcgaagatgagttttcaaaagagctcttcaatcttcgcggagcattatcaatggctaatgccggcccaaatacaaacggcagccaattctttattgtcaacaatcaaaacgtaccagcgaatatgcttggtcaattagagggagcaggttatccttccgaagtgatcgaagcatatcaacaaggtggaacgccatggttagacttccgtcacactgtttttggtcatgttgtagatggcatggatgtagtggacgaaatcgcaaacgttcaacgaggaccgcaagaccgtcctgttcatgatgttgtgatcgaaacaattgaaatcagtgcataaaaaagaaccccgcggggttcttttttattgtttcagttctgtgaatgcagcagcaatttgcaggagacctttttgcagcgtttctcgaggacaagccaagttgatccgcatatgttgcgttccggatgggccaaagttgatacctggattcaagaccacttttgcttctttgatcaatttgcgttgtaactctcggtcagaaagaccgtaggcagagaagtctagccacataagataggtgccttctggcttttgaaacttgatttcaggtaatttttctaccaaaaactcacaggtccattcgatattggctgaaagatagttaagcaattcatccagccatgcttctgactctcgataggctgcttctgttgctacaataccgaatgtattgatttcactttgaacatttttttcttgaacagttatgaattgttttttcaaatccagatttttgataaagatcattgaatttttgatgccggccaagttgaatgttttggttgctgaagttaaaacaatggagaaatcagcaaaaacaggatcaactgtctgaaatgaaacaaatgtattcggagcaaaaacgatgtcttgatggatttcatcgctgaccacgagaacatgatgtttttgacagatcgacccaattgtttgcagctcctcttttgtccacacacgaccaccaggattgtgtggattacacaaaatcatcagtttgacatggttatctacaatagcagattccattgcaacggaatcgatttcgaaatgcccgtttttttcgatcaacgggttgcgcacaagttgacgctgatttttttcaacaacgtcagcaaatggtgggtacactggatcatgaatcattacactgtcgccttcattggtatagctctgcacagctaatgcgagactagggacaacaccactgttgaacaaaatctcctctttttgtagcgagtagttgtgttttcgttcttgccaagaaatgattgcttcgtacaaactttcagggaaaacagtatagccgtaaattccttgatcaatcacttgctgcagggcattcttgaccggcttaggtgccaaaaaatccatgtcggctacccataacggcagtaaaccttcttccttataggtcgtagcaatactgtcccactttacactattggtatttaaccgtgaatggacattgtcaaaattcgtcatatgtacccctcctagatcgtttttttctactacttcaaatctaacactagttcaagtataataaaagatgaaaagagaggaaatcatatggactatcaaatcggaactattattgacggaacggtcacaggtatacaaccatacggcgcctttgtgtcgctcgataaagaaacacaaggcttgatccatgtttctgagatccagtctggatacacgaagaatattcatgatgttttgcaagtgggccaggaggtgcgcgtacagattatcgatatcgatgaatatagccaaaaaatcagtctgtcccgcagaacattagaacaaaaatttgttcagcttccttataagcgcaaaaggtattttacgaataaaaacaaacgaatcggttttcggacgattgctgaagccttaccaaagtggacagcagaagccaaagagatgctggaaaaagaaaacggaaagagataatcgtgcatattttctgaaaatgtgctaaaattgatttacaatcagttgaataaccgaggtgggtattttgggatccaaaaaagtggcaggaacagttatgatgcacttggcaaatggctcgaaaaagtttttgatgcagacgcacgaaggtaccgcagaactggcatctacagacttctctgaagataagaccggtctagcaaatattttacaattgtttaaagacagtattcatttagacgtgacagcgatcgatcttgttgaattaaccaatggatcgattgatgctgagaatattccactttttgtttttgaaacccaagaatcaggacaagacaaacaactacctgatggttatgcgtgggaagaaccgaatgttttcagacaaattattgaagattacaaaatagaaggtatgccattcttctaatcaaatggatagaagacaactacataaaaaagccgttgatacggctttttttcttttcagaaaatttattggagaaaaacagaaaatatgcttgaccctcagagagaataatggtaaatttatcaacgttggcaaaacacaccgacagtcaaaacctttcaaaaaaactttttgaaaaaagggcttgaccaaaacggaaacagatgatattataacgaagtcgcaaatttaagaaatcaatttgatgctgatgcagcaacaaaaaagattgaaaaaagttgttgacaaataacaattaatttgttattctgatggagtcgctgatgacgcacaggaagttgttgaataaacactttcgaaaaaaacttttaaaaaaagagttgacattcgcttgttaatctgatatgatttaaaagttgctaacgcagcgcagtagacctttgaaaactgaacaaagcaagcaaacgaaccaatgtgtagggcgcttcattatatgaagcaaaatacatgcaagcaatagctagcaaagttaattttatttgagcttaacgatcctatggatcgttcaaacaaatcattatgagagtttgatcctggctcaggacgaacgctggcggcgtgcctaatacatgcaagtcgaacgctttttctttcaccggagcttgctccaccgaaagaaaaagagtggcgaacgggtgagtaacacgtgggtaacctgcccatcagaaggggataacacttggaaacaggtgctaataccgtataacactattttccgcatggaagaaagttgaaaggcgcttttgcgtcactgatggatggacccgcggtgcattagctagttggtgaggtaacggctcaccaaggccacgatgcatagccgacctgagagggtgatcggccacactgggactgagacacggcccagactcctacgggaggcagcagtagggaatcttcggcaatggacgaaagtctgaccgagcaacgccgcgtgagtgaagaaggttttcggatcgtaaaactctgttgttagagaagaacaaggatgagagtagaacgttcatcccttgacggtatctaaccagaaagccacggctaactacgtgccagcagccgcggtaatacgtaggtggcaagcgttgtccggatttattgggcgtaaagcgagcgcaggcggtttcttaagtctgatgtgaaagcccccggctcaaccggggagggtcattggaaactgggagacttgagtgcagaagaggagagtggaattccatgtgtagcggtgaaatgcgtagatatatggaggaacaccagtggcgaaggcggctctctggtctgtaactgacgctgaggctcgaaagcgtggggagcgaacaggattagataccctggtagtccacgccgtaaacgatgagtgctaagtgttggagggtttccgcccttcagtgctgcagcaaacgcattaagcactccgcctggggagtacgaccgcaaggttgaaactcaaaggaattgacgggggcccgcacaagcggtggagcatgtggtttaattcgaagcaacgcgaagaaccttaccaggtcttgacatcctttgaccactctagagatagagcttccccttcgggggcaaagtgacaggtggtgcatggttgtcgtcagctcgtgtcgtgagatgttgggttaagtcccgcaacgagcgcaacccttattgttagttgccatcatttagttgggcactctagcgagactgccggtgacaaaccggaggaaggtggggatgacgtcaaatcatcatgccccttatgacctgggctacacacgtgctacaatgggaagtacaacgagttgcgaagtcgcgaggctaagctaatctcttaaagcttctctcagttcggattgtaggctgcaactcgcctacatgaagccggaatcgctagtaatcgcggatcagcacgccgcggtgaatacgttcccgggccttgtacacaccgcccgtcacaccacgagagtttgtaacacccgaagtcggtgaggtaacctttttggagccagccgcctaaggtgggatagatgattggggtgaagtcgtaacaaggtagccgtatcggaaggtgcggctggatcacctcctttctaaggaatagtacggaagactacacatcgtttgcctttgttcagttttgagaggtttactctcaaaatagtttgttcattgaaaactggatatcgaagaaaatcaaaacaagtaacacacaccgagttgacaagttaaagagttttttaataagttcaacgcttattttcttgagcaaccttctatcgctagaagaagtactcaccgaccgtaaggtcaaaggttaagtgaataagggcgcacggtggatgccttggcactaggagccgatgaaggacgggactaacaccgatatgctttggggagctgtaagtaagctatgatccagagatttccgaatgggggaacccagcatcttttataggatgttacacagttgtgaatacatagcagctgtgaggtagacgcagagaactgaaacatctaagtacctgcaggaagagaaagaaaattcgattccctgagtagcggcgagcgaaacgggaaaagcccaaaccaacaagcttgcttgttggggttgtaggactccgatatggtagttgaaacagatagtcgaaatacttggaaaagtatgtcaaagagggtaaaaaccccgtagatgaaatctggctcacacctaggaggatcctgagtacggcggaacacgaggaattccgtcggaatccgggaggaccatctcccaaggctaaatactccctagtgaccgatagtgaaccagtaccgtgagggaaaggtgaaaagcaccccggaaggggagtgaaatagatcctgaaaccgtgtgcctacaacaagttagagcccgttaatgggtgatagcgtgccttttgtagaatgaaccggcgagttacgatagcatgcgaggttaagttgaagagacggagccgcagcgaaagcgagtctgaatagggcgaatgagtatgttgtcgtagacccgaaaccatgtgatctacccatgtccaggttgaaggtgcggtaaaacgcactggaggaccgaacccacgtacgttgaaaagtgcggggatgaggtgtgggtagcggagaaattccaaacgaacttggagatagctggttctctccgaaatagctttagggctagcctcggaattgagaatgatggaggtagagcactgtttggactaggggcccatctcgggttaccgaattcagataaactccgaatgccattcattcatatccgggagtcagactgtgagtgataagatccatagtcgaaagggaaacagcccagaccaccagctaaggtccccaaataactattaagtggaaaaggatgtggggttgcacagacaactaggatgttggcttagaagcagccaccatttaaagagtgcgtaatagctcactagtcgagtgaccctgcgccgaaaatgtaccggggctaaatagtttaccgaagctgtggagtgcaccgtaaggtgcattggtaggagagcgttctaagggcgttgaaggtagatcgtgaggactactggagcgcttagaagtgagaatgccggtatgagtagcgaaagacaggtgagaatcctgtccaccgtatgactaaggtttcctggggaaggctcgtccgcccagggttagtcgggacctaagccgaggccgacaggcgtaggcgatggacaacaggttgatattcctgtacccgttgtttttgtttgagcaatggagggacgcaggaggctaagaagtacagactgatggatatgtctgttcaagcagtgagtcttagtgggagtcaaatgcttctactttcaaggacaagctgtgatgaggagggaaataatagtaccgaagcttctgatgtcacactgccaagaaaagcttctagtgagaaaacaatggcccgtaccgcaaaccgacacaggtagtcgaggagagcatcctaaggtgagcgagagaactctcgttaaggaactcggcaaaatgaccccgtaacttcgggagaaggggtgctgctctaacgagcagccgcagtgaataggcccaagcgactgtttatcaaaaacacaggtctctgcaaaatcgaaagatgacgtataggggctgacgcctgcccggtgctggaaggttaagaggagtgcttagcgtaagcgaaggtacgaattgaagccccagtaaacggcggccgtaactataacggtcctaaggtagcgaaattccttgtcgggtaagttccgacccgcacgaaaggcgtaacgatttgggcactgtctcaacgagagactcggtgaaattttagtacctgtgaagatgcaggttacccgcgacaggacggaaagaccccatggagctttactgtagtttgatattgagtgtctgtaccgcatgtacaggataggtaggagccgtagagatcgggacgccagtttcgatggaggcaatggtgggatactacccttgcgttatggccactctaacccgcagcccttatcgggctgggagacagtgtcagatgggcagtttgactggggcggtcgcctcctaaaaggtaacggaggcgcccaaaggttccctcagaatggttggaaatcattcgaagagtgtaaaggcagaagggagcttgactgcgagagctacaactcgagcagggacgaaagtcgggcttagtgatccggtggttccgcatggaagggccatcgctcaacggataaaagctaccctggggataacaggcttatctcccccaagagtccacatcgacggggaggtttggcacctcgatgtcggctcgtcgcatcctggggctgtagtcggtcccaagggttgggctgttcgcccattaaagcggcacgcgagctgggttcagaacgtcgtgagacagttcggtccctatccgtcgcgggcgttggaaatttgagaggagctgtccttagtacgagaggaccgggatggacttaccgctggtgtaccagttgtctcgccagaggcatcgctgggtagctatgtagggaagggataaacgctgaaagcatctaagtgtgaagcccacctcaagatgagatttcccatttctttaagaaagtaagatccctgagagatgatcaggtagataggtcagaagtggaaggccagtgatggttggagcggactgatactaatcgatcgaggacttaaccacaattgaaaaaagcaaggaaactcggaagagttttgattcttcgatccagttttgagtgagcaatacttactcaattgaatagtgtggtggcgatagcgagaaggatacacctgtaaccatgccgaacacagaagttaagcttcttagcgccgattgtagtgaagggtttccctttgtgagagtaggacgtcgccacgctgtttcattccggcatagctcagttggtagtagcgcatgactgttaatcatgatgtcgtaggttcgagtcctactgccggagttatcgatagctgtgaagctatcttttttttgccattttggagcggtctttctactagcggaaagatcgctctttttttgcagataaaagttaaaactattttgaggaaccaaaagatcagtcgatttgtcgaatgtttcaaaaaagaagcgtttgcgggagagtcctttttttcctataataaggaaaaggggagatgacatgaaacaacaattattttttgatttagatggtacgatcattgattctagcgaaggaatctattcttcgattcgctatgcactggaaaaattaggacatgaacctctctcaaccgatggattgagagcctttgttggtccaccactgattaattcttttcgtgatctaggctttacagaagagactgcgcagcgtgctgtgaaatattatcgggagaattatcgagaaaaagggatgtttcagattacgccttacgaaaaaatcgaaaccactttggctgaactttcggaaacacatgatgtcttcattgctacgtcaaaaccagagatattcgcaaaagaaattttaagttacttagattttacagattacttcaaaggaatttacggagctgatcttgaaaataagcggggagaaaaagcggcagtccttgcatatgcactagagaaggcggatggcaatacaagtgccttaatgattggtgatcgaagccatgacattctaggagcaaaagccaatgggttatccgcgatcggtgttctttatggatttggtagtgaggaagaactactttctgcaggagcagtcgccttggcagaaaaacccctagatttgctggaattgatcagaatggatcatgctggaaaataaatgcaaaaaagagcttagaacagaggaagaaaggtgattatccccgcgatgtttgattagtagcgggacttacttcgactcttttttaagctcatgaatgttatttgatggtagtagtttttaggactaagacgttattatccagatagccactctcatttttcaaaacgagggtgccggaagtcggatgcaccattaactcgaggtgaccagttaaaaacattgtgtcgtactcagaagtatagaaagtaaacaaattgctagggatctctaatgtaaaaggaacaatgatttcttcaataggtgcgatcaagaaacgctcgccaatcatacagcagccttcagcagaggaaaactggttggaaccatcattggctgtcaagataaattgagttgtaccttgtggaagacgttgtgctgcttctgtggtaatcgttagctccatttctagtaccttctttctataaaagcaattgctatttttctttgttggctgattgacttgaacataaaaaacttataaacagataacgaaaagcattggaccagatagttagcttggggaagacgactaaaagggcacactgcttcttttgttattttaacatggaaatgctaagatgcaaagactcaggtgttatttcgttcctatcgtagtaagaagtaggctatcaatccgagaatcacgaaaaaaagaccaatatacagaataaaagttaacagggcttgaaagaattgacgcattgtcttcacctcaaatcagttgttcactatgattctagcatgaaagagcctgtttgaatgaaattctagaaatctttgtagatgtttaaggtttattcatgggaaatgaagtaaaaaaacatatattgcatgcaattggaacagaaaaaataaaaataacaaagcagttcattcatgaatctttcagctgtcacttgaatgtggtaaactaaagaggaggggataaaaatgttgcgtacatgtcaaaatgttctcgttgcgttagatggttctgagcaatcagaaaaggccttttgggaagctgtcgatatttgcaaacgaaacaaagccaaactgtatgtcctttcaatcattaacaatgcagagctttcaacgagtgcttattctttttcaaagctatttgaacaggaaaagacgagggttgaaaccgagatgctaaagaaaatctatgatgcaaataaccatggtgtcgaagacgttgcggtgatcgtagaggtaggagaccctaagcgatttatcatccatgcagcaacagaaacttatccaattgatctaatcgtgattggtgcgacgggtaaaggaactctcacaagagctgtagtgggatcgacaactgactatgtcgtcaaccatgcaaaatgttcggtatttgttgtgaaataaactattgatttgtttgatcaaaaaagggaaatcaggtaactgctgatttcccttttttatttgatgaagttttggataacgtaatctgataggtctaagttgatttatcagataggaatcacacatggtgaatacaacaaaatctagtgcagttgtactatatctagttgatatagatttgagaaaaacttttatatttttattcagacatgaggaaagtattatggacagcagtagtgtatctatcgatgattttagatttgattcttttcaatcaagcaattggatttgtttgaaaacaaaataatattttttagcttcaatgatagtgctgttttgtgattatatctataatttgtacagatttctctttattttattgctagaatttcatcccgccatgaagtaaaattttagttgcatacatactatgtgaaaaacgaaggaaacagattattttagtatcagaatggtggagaaaaatgactacaaaaatttggaagcgcttcaaaatagagttctcagtttatgtcggtattggtgtagcagtttctttagtaagtgctattaatgtgttttattttcaaaagttgctagatgcatttggtcaaagcatgcctattctaaatctagtgatttatggattgacaattatcttcgttccaatattttcttatctagaacaaaagcctaaaatgaaactccaaagtggtattttcttttatttaaaagaaatggcattagacaagattagtagaatttcctattcggaatatctaaagattggttcgggctcgcttttgcaaaaagttgaggctgggtcaagcgctggtagaaacattcattaaaacttttacggaagactttttagagagttaataccagaaactttttttaatttgttttttatagcgataatcgatttaaaattagttccagccattttaatcggctacatttttatctttattgtaaccaagtatttgttgaaaatattaaaagctataaaagaaaactcactaatctctgaagaaataatgaataatactttaatacgtggcatcacagaaatggttacttttcgaataaataaacgctataaaaaagaaatagctaactatcacgaaatgtcaatttctacaacaaacaatttaataaaaatgacaatgatacatgaatttttctttggcttttttgcttttctagttgcggtcattaaattagtcatcgttatattaacatttgcaaacgttatatctattagtttaggtggattagtcgcgttggttacttatgtcgatagagtttatacaccaattgctatcttcaatgtagtttttgtccaatatcatttggataaagttacatatcaacgattacaagatttttatgatacttcaaatgatgaaggcctcttcatcgaaggagcacctatacaatccatagcaactatcagtctgaccaatttaaatttaaccattcaaaacaaacgaatattgaaagatttcaatttagacttagagaaagataaaattttggacttgttggagaaagtggagctgggaaatcttctttgatgaaagttatattgggattattcaaacccactagtggagatatttttgtgaatcataagaatttatcttcgtataatttaaatgaatactacaatcatattttctatctctcacaagatgctcctatttttcagggaacattaaaagaaaatattgtttttgacaaaaatataccagatattcaagtaatagaggcactagagaaatgtcaattaggacatttttatcattcacttgaagaaggattagatacacgaattggtgaaaaaggttctaatatttctggtggagagaagcagcgtattgcgtttgcgagaatgttcttttctactgcagagataatagtgatagatgaggccacttcggcattggatgaatcaaccgaagaaaagttgctcaaagaagtaatgaaaatatttaagaataggatcgtccttatgattacccatcgtccgaaaaaccttgaaattgttgatgaagtaatcgtacttagtaatggttataaaatcagataagtgatttcaccgtatacggagtaaatagactaactacgactaactggagagcagcaaggtctgaatacgaaataagctgggaatgtttatgctagtttattttttctgcaataactctccattttcctgttttccgtaactatttaatttcccacttccaactaatttcccacacgtactatttaaatagtttgtagttgctttattcaaggcaggtgttcgtatattttctaattgaagtgtcgttttgttttttcgtattttttcctaatttaagggaaataattgacttttataaatgataaagagtacaattatgaaaaataaaacgaaaaagaggaaaaaatatgaaaaatgttctaaaagaaaataagcaatttgtattaataaccagtctattagttgttattggctctttaacatcaatgattactcctctattcatacaatattttaatgaaaataagatcaaactaacctatggggagcgtcaataattttgtgtaaatgattcttccctactgcagattgtttctaattctcaatcagttggcttagcatttgttcaagttcgccttcggcctgttgaaagcctttatgactgcgacctaggaatttttggttgtaagtatcaaaagacgagactaagaaacgttccatcgactcttcgttttggaactgttccttgcggtggctgtatttcttgatttgcttattaaaggattcaatcaagttcgtagaataaatactcttgcgtatggccaaggggaaatcatagaaagtgagcaagtgatcgttcgaaagaatcgattcaaccacttttggatagctggttttccatttttccgcaaaagcaccacgtgcttccaacgccacctctttagatgaggcttgatacaccattttaaaatcatcacagacttccttacgatcatcgacacgcactttgtgactgatattacgggaaacgtgtacacaacaatgttgaaaacgagctttgggatagaaccgactaatcgctcctaccatcccctttaagccatccgtgatgaacaggaggacatttttcaaaccgcgctcttgaaggtccaataaaatttcctcccaaatcgtgatggattcagtcggtgcaatcgcatagctcaatacttcctttgatccgtccgggcgaatgccaactgcgatatgaatagcttccttggcgacggttttccgctttaacggaatatacgttgcgtccatataaatagcagcataacggtcatgaagctcccgccctttaaacgccgttacctcttctgtaaatgattttgttatattggacatggtttggggcatgtagtgatgcccatacattttctcaatcaagtctgcgatttccgacatggtaataccttttcggaagaggtgaatgacggtctcctctaacgtgtcattcgtccgtctataagcaggaacagtctgttgcttgaactcaccattgcggtcgcgcggaatctggagatgaagttccccatactcggtcttgaccgtacggtcataggagccgttacgagaattacccgtgttaaaaccaatgcgatcatacttttcgtaatctaggaaagccgttaactccgttttgagaagcgtattgactgctttctccaaatggacacggaataattcattcaaatcgcctttgttcgctagagtctttagaatttctgtagtaaaatcgttcatagggaagtcctctcttctgtgaatgtgttgtggtaactctattctacagaagggacttccttttttctatttacacaaaatattttacactctcaacctatgagataatgctctttatagttatagttatgttgttttctttcttattgcagactttcatgctcgtgtatagagaaaattttgcagcaaagtttaattcgaattatttgttcaaactgataagtaagctgactaaaatttcttatgatggttttattgaaaaagaacccacgtatttaattaatcgtatatttacttcagtggattctttatatttatttttgattaatagtgtatcgactatagtaaagtcatgttttgtaattttgttatctctaggaattgttggatttatatcatggaaaatttttttgctcttattgatattacttcctttaaatttagttggctttaagcatattaacaagcaattatctattagaatggaaaaaatgcaaaaagatgctgcaagtgcaaataaagatttaattgtgacattatcaaatgtggataatataaaatcccaagctaatgtatctgcattagaacatctgcttaaaccaaagatgattgcaatgtatgattcattagcaaataataataaatatgcacaagttactagtaatgctattgtctttattaatcaattggttcaaaatatgacttatatttgggcgagtatattaattgttcaaaatgaatttcctgtgggaaatttaattattctaagtattgttattccaatgtattattccgctttaagtgatttatctaaggcaaatgtagattataaatctttaactatttctaatgagttcattaagaataatcttgacttattacgtgaagaaaatggggaaataaaaatacaaaatataaacaatattgagtttaatttcccatcatttttaataaataaacaaatttttaattataatttaaaagaagtagtgaataaaggggatatagtttatatagaaggagattctggtagtggaaaaacttctctattgagactgatgttgaaatttagaaaatctaaaggaataaagatcaatggattagaaattaacagcttggaaaattcaagtttaaggaataaaattgcttatatttcacaagatccaacgattttgtctacgtcattagaaaacaatataggaatgggaagaaaactaaccagagatgaaaaatatttgattgaaacatctggtattttaagtccgatatttaaagaaaagcattgggatagtgtattattagaaaatggtgcgaatttatctggaggagaaaaacaaagaattgcagtatgtagattaattatatctgatgcagaattatatattttagatgaaagcattagtaatatagataaagaatctgcaaatgcaatattgaatttcattacaatcaaatcacaagagaaaattattttatatacaacccatgataaatcattcaagaaatacgcgaacaaaattattaatgtaaggagataaactatgaatcacgatttgctaagtgtatctgaagttgcggatgcattgggagtaactacaagaactattagaaactacttgtctgatggtaaattaaaagggcaaaagattggtggacaatggaaatttttgaaatccgaagtgtatcgttttataggtcagtcagttgagaaccctgttactaacttttttgaaaacgagaatcattttaaaacgggttcaatactcgtcattaatattccaatctctagtatgaggttagttgaaaatttaaaaaatgatttgttgaatcaatataacaatgtatacgatggagaaaaccgacagttcttttatcaggcaatttctaaagaacaagccagagtaataatacaaggccctatagaatacgtagctagttttggtgactggataaataataggctaagaagttattcttgagaatcattgatatttatgattgttcaaatgaacataatgaacagtgtgaaatagtgatgcaatgcatggaccgtttatcattttcgttgttgaaataaggagcaactgaaaatcatcggtgctaactgcaaacaaaaaaacaacgtcccaagaacgttgttttgagaaagccacttgacgggcttgaaccgtcgacctcatccttaccatggatgcgctctaccaactgagctaaagcggcttgttatttaacacaagatatagaatacctgaaagcctgctgtttgtcaattccattttttcaagagtactgggattttttgtcaaaaaaggtgaacaacaagacaaagaagcaaaaatttcttttttcacttgccaacttatctgaatatttgctatattacaggtagattcttccggcatagctcagttggtagtagcgcatgactgttaatcatgatgtcgtaggttcgagtcctactgccggagtcataaataaaacgtccccattgatgaaaagatgatggatgggtaaagcaaacccccctgaaattcaggggggttgctttatagatagattcaacagtttatctccttgcggctacttgttttttggataagcaaagcagtcgacatagggaagtcactttatttcagagactcgatagttgtctgctgctttacgatgcttatatgttgacctaccccacagtgatttattggaaaatgactcattcgactattgcgcaagtcaagacccagtttccttaaaaaggtgtccaaagtggataaagaagatgagagggattctatggacaacagcattacatttacaaatagaaatgaatttcgtgactggcttcaagagtatggtgtatcaagtgaaggggtttggcttttgatcggaaaagctggcggtcctaagacgataaaggctcacgaggcacttgaagaagcgctttgttttggctggatcgatggcgtcatgcaaaagattgatgataaaacatacaagaaatactttgcgaggcgcagaaagaacagcaagtggtcagaaaaaaacaaagcactagctgaaacattggaaagccaaggactaatgactgattatggtcgaagaaaaatagaagaggccaagaaaaacggtcaatgggatgcggttcagtctccaaagatttcggaggaacaaatctataccgtagcaagcttattaaagaaacatgaggcagcttatacaaatttccaagcaatgtctctctctgtcaaaaagacctacacgcgggcatactatgatgcaaaaaccgacactggacgcgaaaagcgtttgtcttggatgattgaacggctagcgaagaatctgaaaccaatgtagcgatttttgggactgtgccataagtctcctacaagtaacactatccgaacattaatgattattgctcctgcggtgcagggactcctcgtcgcaaaagtcagaggaatctatcctagcaacagactattattcggtttaacttgttggatgatgacatatggcacagtcctgatagctaagaagcatgaaaaatcaagcgaagcgactcgggcaatttttactaattgcaggtgtcgcttcgcttgtttgtcttgcttgctaaatatcttcttattgcctactgaagcttttgctccagagtctcatacagtttgacggtctcagaggcgtctttgttcgtatagtagatcgtgatatcggctgtcgagagccgaagaatgggttgcgatcgtttgtccatgaatagtttcgcagattgaccagcaacgttaaagttgcctgtcaggtaatgatctgtcgccatccccattgtgcgaaccgttggctctggaagtgtatcaacaagcgtgactgttctgatttcatccaacggaatcgtttgtcggctagctaatggggcatcaaactgtacggattgatctgtcatctctccacttattgcatcaggattaaaatctaattgatacaaaggaacgatagtgacaaccatgatcgcgatcatcagaatgctggtgccgattgctaaaccttttccggtctttttgcctaagttgataccgatattcaaccccacgcggtcagggacaaataatcgaggatctgttggattaatgtacacgccataacgccaataacggtcttcatcataataccgttgttccgtagaagccaacaattgatcttgtttttttcgtaatcgcagcaatagcccaaaaggaacgaccatcaagaagaccagtaacaagacgaaaagaacagcggataactctccaactacccccgtcaactgggtcgagagcagtggaacaaaaaacaatagcagtgtgcccgtgctcattaagacgaccagaagggaccaatagaatttcgttaaatcattgaactgttgattgatttgaaaatccttcgtcaatggacgtactggtaagcggcgaatcacttgccataaatagaggaaaagcaaaaagatcaagcagttgatgaggctgaatagccaaccgggtccgttctccgcggtagggaaataaattacaccagcaatgactaataacaatgatggaagaaaactgactaatggcaacagttttctatttttttgctggatcaatttggtgtctactaaaacaggatcgatagggagtccccagttcttatgctcaattagttcgtgcatttttctaatataatgaatttgtaagacgtagcttgcccccagaagcaaaaacaagagcagccagaaaaaggtcatgaggatagagccatataaattgaacaaaaaaatcagacttgctacacttaagataccgacaaactgcataatacggcggcggtattcagcaactaacgccaaaacgtccggatgctgcaagtgatcaggagataatgtattttccaataatacgtttttgtggggcttactgagcagattcattgtaaaagcgatagaaaaaatgacgatcagatttatgccaaagaaaatgtaattcatttcaattcggtcctttcagaaaactgttctaaacattgctgaatatcggcaatgatcgctgcttcgctttttccgtgaatcaatgcagaggctacttgcagctgcagctgttgttgataatattcttcttcggagaaggtaaagctgcgaggcgctgcgacagcagttcctttgcgccgatcggtaatcagcagcccgtcttctttcagtgaattataggctttagaaatagtcatcgtgttgatgccaatctcttctgcaagttgacggacagagggaagtagttcgccgacagctaattcgcctgttgcgatcccaagaatgatttgatcgcgtaattgttgatagatgggtgtattgctttgaggtttgatttcgaattgcactggcgctctctcctttgtattatctatattaatacaaatagatggaacatgcaatcaataatcatcctctctataaggaactcacttcgcagcattaggagtaataaactgaaatttttcgttgctgttttgcaatcactttgttatcgcagtgactgaatattacggtatgcttttagttagaaaaaataaaggaggagacattatgagccactccccgaggacggcttacttcgataatgcaaaatttttattaatgattttagtggttttcagccacttattgcaaccattcattggtgatcacaagttttatcatgatctgtactattttatttttacctttcatatgccagcctttgtttttttagcaggttattttgccaaaccgctcacaaaaggttcaaaagttcgagatctggtcaaaaagtttctacttccttatgtgttttttcaacttttttatacagtttattactgggtgattggacttgacgcgtcgttgaatattcagctgctcaaccctcaatgggcattgtggttcttactcagcatgttcttttggcagctttctctcgtcttttttcagaaaatgactgccagaaaagccatcttgcttagtgtgctgctgagcatttttgctggttacctcccttttattaatcaagttctgacactgcagcggacatttgtctttctaccattttttatcatcggtttttattttcctaaaaatgagatgcagtttttacaaggaacacgaataaaaaaaatcagtctggttttcttgccgattatctacttgtttattgcgcttttccatgggatgaataagtacatggtctttggctcgaaaccttatgaagactatctgagctatccattgttcggaggaccattacgaggggtgttctttgtgattggactgctggggatcattggttttctgcgactcgtcccacggcaacagctgttttttaccaaatggggcaagaacacactgttagtctatttgctgcaagggatctttattaaaggattgagagcactggcaatcactgaactaaacttgtcactgctcggatttatggcgttgatcgtcgtcagtgttttactgacgatcctattagccagcagacctgttcggcagttctacgcccgttttgaagaagggatttcttttgtcctattgggcttgggtatcttcatgattgcgaactgaatctaaatggaaacaccgccttcgcaagtttggatctgccagacttttgctcaggcggttgttatttgatttggacaagagtaaaatgaagagaataaagtgaaaggatggagaaatatgtcagaaatttccaaaaatactactgaaaaatttgctgaagcgtatcagcaaaataacaagcaaaatgcactgcaaagaggcgtggtcaaaaacgggatcactgcttcagcagaaacgattcaaggccatgtcaacaatgtaccagtcttttcagttgatgtgacgactggcaaagtgtcaaaccaaaaacaatcaggtcgctgctggatgtttgcagcattgaacacattccgtcacaaaatgttgaatgcctttaatttgaaggactttgaattgtcacagaaccatacttttttctgggataaatatgaaaaagccaactatttttatgaaaatgtcttggcaacagcacaagagcctttatctagccgcaaggttgctttcttgctgcaaacaccccaacaagatggcggacaatgggatatgatcgtgtcgatctttcaaaaatatggtgtcgtgccaaaagcagtgatgccagaaagcagtaattcatcgaattcccgtgacttgaacaactacttgaacaaaaaattgcgcaaagatgctgggacattgcgccaattagtggcggatggacaatccgaagcagctattcaagaagcaaaagaagggatgctacaagaaatctacaatttcttagcgacttctttggggactccaccagaaacgtttgactttgaataccgtgatgaagagaaaaattatcatattgatcgcggactgacgccgcaaacattttatgacaaatatgtaggggtagatctggatgattatgtaagcatcatcaacgcccctactgctgacaaaccttataacaagtcctatacagtggaaatgttggggaacgttgttggaggtaaagaagtgaaatatttgaatgtggatatggaaacattcaaaaaattggcgattgcccaattagaacaaggagaatctgtctggtttggctgtgatgttgggcaatcttctacccgtgattctggaatcatggcattggatgcgtatgatatgaacgacttattcgatatcgatttcacgatgacgaaagctcaacgtttagattatggtgaaagtctgatgacccatgcgatggtcttgactggtgtggacatcgttgatggcaaatcaacaaaatggaaagtcgaaaacagctggggagaaaaagtcggtaccaatggattttttgtaatgagtgatgaatggatggatgagtacacctatcaaatcgttgttcgcaaggaatttttgacggccgaacaactcgctgcttttgaagcagagccgcaagtcttagctccttgggaccctatgggagctttagcataatgaagaaatgaaaagctgtgggcgtatgttaagagacgatcgaacaaattttacgaggactgagatagaaacggttcattttctatcaggtagaccaatttgtttgatggaccgtttattagctgcgctgtcacagctttttttgtccatttttatgatctttagcagaaaaatgtgaaacttattaattgtaagatcgccattctttctataaaataaaacagtcactaatgatgccacacgtctcattagagtgaactgttgaagaatggtcactgggaacctttacttccactgacagactttgtcattttacttaatgttaaaggaggagactaatgacaaatctgtttatagttattgttgtacttatttttgctgcccttatttatgggttctacctgatgcaaaagcgtcatctgaaattctctacacgagtgtttacagcgttgtttgtcgggatactttttggtggtatcttacaggcgatctttggaactggctcggaagtgatcacccaatcactagagtggatcacaatggtggggaacggctatgtagcactgctgcaaatgttgatcatgccattggtttttgtttcgatcgtcggggcatttaccaagatgaaagaaagcgaaaaaatcaaaaaaatcagctttactgtgttggctactttgttgggcacgacagcaatcgctgcactgatcggaatcgtgatggttatgttgtttggtttagacggtgcgagttttactgaaggcgcagcggagaccgcacggatcgctgagttggcagaacgttctacccaagtccaagacttgtcaattcctcaacagatcgtatcctttattccgaataatgtttttgccgatctagctgggacacgttcaacgagtacgattggagtggtaattttttctgcttttgtagggattgcctacttaggggtgaagaaaaaagccccgaaagaggcgcaaacgtttgctgatctaatggatagcttgtacaagatcgtgatgcgaatcgtcacacttgtgttgcggttgactccttatggtgtattggcgttgatgacaaatgttctagcatcaagtgatttcgaagcgatcctaaatcttgggaaatttattttagcttcttatgcagcattgatcattgtcttgctcgttcattccttgttgttagcgagtgtaaaagtcaatccaattacttatttcaagaaagcttttccagtgttaagttttgcatttacttcacgctcaagtgccggtgcgttgccattgaatatcgaaacgcaaacaaaagcgctaggtgtcgacgaagcaaccgccaattttgctggtagctttggcttgtcaattggacaaaatggctgtgctggtgtgtatccggcgatgttagccacgatcgtagcgcctacggtaggaatcaatgtctttgattggcagtttatcctgcttttggtggcggtcgtaaccatcagttcttttggtgttgctggtgtcggtggtggggcaacctttgcttcattgatcgttttaggatcaatgaacttgccgatcgcaatcgttggtctagtcatttctgttgaaccactgatcgatatggctcgaacactggttaatgtcagtgacagcatggttgccggtgtggtgactagcagtcgtatccatgaactagatcgtgcaacacttgaaagtcaaactgctgtgattgatgccgattgattcaagtagaagccgctactaaaatcaagtgataacaaaagagtgtttattaagaaagactgcgtgtggtctttctttttttgtgaccaaaaatcagagtcactattgttattatgtgtcattatggcttactctgaccgctatctttagtagatgagagaataataaagaaatattcaccgctttttttatgggtttctgctatactttttgtatacaggcgcaggagggatcaagatgacacaactgattcagttagaaaatgcagcaaatgtcagagaattaggcggttataaaacgacatcagggaagaccattaagcggaaaaaactgattcgtagtgccgcgatcaatgagctgtctgagacagatcaagcaacattgagcaactatggcatcaatcaaatcattgattttcgttcctatgaagaagccaaagcacagccagatcagccaatccgttatgcccagcagttctttttgccgatttttagcgaagatgaaacgatggtttccttatcaccagagacattgaagcaaaagctggcagatggggatgatgcagaagatcagatgaagaaggtatatcgccactttgtcgaaagtccgcatgctcgaaagcaataccgtcatttttttgacttggtattagaaaatgcggaagcaggagcaaccctatttcattgtacagcagggaaagatcgaacaggcttcggggcatttctgctcttatctttattagaggtggatcaatcaactatcaaacaagactatctggcaacgaatcgctatctggggccttttttaaaagagaaatttgcccctatggcgcagcaaatgccgcctgaagttcttgaagccatcaccacattgatgagtgcaaaagaaagttttcttgatgaaagtttagcagcgatcaaaaaagaatttggcacggtggatcagtatttaaaagaaggactggcaatcacaaaagacgaaaaagagtattttcacgcccactttaccgagtaaaggatgtgtccaacatgaatcaggaattgcttgcccagtttgggttatccggaacattaacgccgatcagcgggggtgacgtgaatcagacgttccggttgcggtcagaagaaagacagtatttcttgaagtatcatccaggagtatcccagcagttttttcaagcagaagcagcaggattggcacaattacgtccctatgttcgcgtacccgccgtttatcaatatggagataacgaacatggcgcctaccttttgctagaatggatcgatgttggtgaaggtgatcaagagtcgatcgccactgctttagctgagatccatcggcaaacaagcccaacgtttggatttgaacaggacaactttattggcttattgccgcaggtgaatcccgcggcagaggattgggtgagtttttataccacgtgccgcttagacgttcaggtggaattggccaagttaggaaatcattggaatcctcgccgagaagataagtacctaaatctgaaagaaacgctgtatcaagagtggtcaggtcgacaggttcaaccttctttactgcatggtgacttttggcgcggcaatgtgctgtttgatcagaagggtgatccagttttcattgatccggctgtatcctttggtgatcgcgaacttgatctggcgatggcgcaattattcggcggatttcgtccggaatttttccaacgctatcagcaagtcttcccgctggaaaaaaattggcaagagcgggttcctgtgtatcagttgtactatttattggttcatttgaatctattcggtgaaagttacggcaataatgtagatgagattttgagtagatattaggaggcatttggcaagatggtagcaaagtatcaaaaagaacatgaagtcgcttattatgagtgcgatatcaatcagacaatgacgtttccagcaatgttgggagtggcaatcaaagtatccgaagagcaaagtgcagtattggagcgtgggccagaatacattcgctcttttggactgacatggatcattactacttaccatatcacggtcaatcggttgccgatggtcggggaacagatcatggtctcaacacaagcaaaagaatacaataaatatttttgctaccgctatttctggctgcacgacgcccaaggaaatgaattagtgaagatcgagtcggtttttgcattgatggatttggcaacacgcaaagtcagcagtgttccagatgagatcgtcgctccttttgaaagtgagaaaatcaagcgcatcaagcgctatcctaaaatcaattccccagaaaaaggacattttttaccttatcgggttcggttttatgatatcgacagcaatcagcacgtcaacaatgcaatgtattttaattggctgctggatgttttaggctatgaatttttgacgacgcatcaagtgaaggaaataacgattcgttttgaccgagaagttgagtacgggaacttggtagaaagtcattttgaaacgattcgggatgagaaccatttggaaacattacatgagatcagaatcggagagacgacgtactgcgaagccgcaatgaagtggcatgaacgaacaaaaaataatgaaaacaactaaccgcactgacaatcgtctgttcttagcgattgaccttctcttaaaaaaggtcagttgctaagaacaagcgaaggtgcggttttttgtcagtttagtttctaaaaaagtcaacaatcagttttccataaagtcgtgtaattcaactaatggcagccgacgatttttggcgatcagcaatttgattcgggctttttgactgttgatgctattgcaaaagatgactcccatctcctgcagttcttttccgcctccagaataaccatagacaggttcggcaataccgttgaaacagcgggagactagtacgactgggatttgtttcgccagtaatttttttagcggcggtaatgtttggggtggtagattgccagctccgagggcttcaatgaccaatccatcgatattggattctgctaaggcctcaaaaagttctccatgcatgccggcataggctttaacgatcggaatcaagccatcgacccgatcaacatccaattggcgactctctaatagttcctgcatgaataatattcgattttttgtgaccagcccaatgggacctagtgttggcgtgcgaaaagttgcaacattcgttgtatgcgtctttgtgacataacgagcagagtggatttcgtcattcataacgactagaacaccctttttttgagcatcatcacattttgctacgcgaatggcactttcaaaattatataaaccgtcactgccgacttcattactggagcgcatggcacctgtaatgacgataggcagctgattgccgatcgttgtatctagaaaaaaggcagtttcttctaatgtatctgttccgtgagtgacaactacgccatcgattccacttaaatgagccaactggatgcgttctttgatttgcagcatttgctcaggtgcaatgtgaggactaggtagattaaagatatcttcaacgatcagttcaacatcgtcatcgatatggataggggcgtccatcaatgggtttgtgacgtctggactgacaccaccggtcaacacatcttctttcatggcaatggtgccacctgtatgcaaaacgaggatttttttcatttttgtcacctcaaagattattttactcataactccaaaactattgtatactaatcaaataagaaaacaagcaaggtgaggaaaaatgattcgaattggttgtacgacatttagtgaacatggttctcttgttcagagaaaaacatcaaaactttttgaatatgccagtgtctttcctgtggttgaactggatacgtcttatcattatttacccaaagagaaggatgtgcggaattggttgacgcaggtaccggataacttccgttttattcttaaagtgcatcaaagcgtaacgacacaaggtgatttgccggaaggtatgtctatggcagaagcactaacagctttcaagcaggcgattcaacctatggtggatgctggccggctttattgtttgctggcacaatttcccaaccggtttaagtgtacgaaagaaagtgtggcgtatttagatgaagtacgtcagtggtttgcagcgtatccggtggcaatcgagttgcgggataatagttggtatcagccagagttccgctcttcgatgcaagcctatatgcgcaagcaaaagttctcgttggttattgttgatgagcccaagaaactctccactacggttcctttagaaccgctagtgactaacccggcatttgccgtatgtcgttttcatggcagaaatgatgttggttggacagctaccggacctgacgccaaaaagaatcggacgctctatcgctacaatgagaaagaattaagtgaactacgtcaagcagtcgaagaaacagcggctcacgcacaagaagttgctgttatttttaacaataatgctggcggtgatgcggcggacaatgcccgcgcgttgatcgaagccatgcaaatcgattaccaacaactgaatcctagccaattggagctattttgaggagttatatgattaaagcaattttttttgacatcgatggtacattgatcgcagataacgggaaagcgatggcaagtacccgagcagcgatcaaagaagccagaaaacaaggtgttttatgtggcgtggcgacaggccgcggacctgtagaattagagaaagtcatcgattatttagatttggatatgttcatcacctataatgggcagtttgtctacaccaaacaaaatttgatttatgccaaacctttctcgaagaacatccttgaagaaattgttgcatatgcagatgaaaattatcggcaggtaatgtttggcggagaaaccaaagtggctggcagcttgacgattcgtttgagtcaatcaccagtgatgcaacgttatttgcgattcgtcccaaagaagtttcccgttggggtgctaaaaaaattgctgcagcgattcagtccaaatcgaaatgccaaacggtatcagtctctggatattttgcgggaaccaatttatcagtgcattatgctgagtcccgaatcagagaaagaaaagctaaagcaaaaactgccttcctgtgatttcaaacgctccaatgcctattcagtggatatcgtccccaagaaaggctcgaaaatgaagggaatccatgagtttttggcttatgaagggatcgcgatcgaggaagccatggcttttggggatcacgaaaatgatatcgagatgttgaaaggtgttggtattggggtggctatggggaatgcgcagcaagtggcaaagacagcggccaattatgtaacagcatctaataatgaagatggtatcgctcaggctctgaaacactatggcatcatcgaataacacataactagaggaataaatggaatacacgaattgattgagtgagatcaacggaggaggaaagaagatgagtccttttgaaatgacagaagaatttcatcaaacctttgacccgacacgtccggagcaaccacggccattcacaccagaaaaggccagtttccgtgcagggttcaaagtagaagaattagttgagtttttgtatgcagcggccaacaatgatcccgagcagttcgcacagtcagtggcggatctgcatcagggaatcgagcaagcaaaagaaaagatcactagcaaacaaaaaccagtgacggatacgttagtcgagcaagtcgatgccttatgcgatcttttgtatttcacctatggctctttttcactattgggtgtcgatccggcaccaattttgaaaatcgttcatgaagccaatatggggaaactttttccagatggcatgccccattaccatcctgtgactcataaagtcatgaaacctgcggattgggaagaacgttttgctccagagccccgcatcaaagctgaaattgaacgtcagatcgtagcaaaaatgaagagttgacttgaaacgagtgaacacccataaaaataagatgacctttgcaaaatcattcgcaagggtcatcttgtttttttgttctaagtgtatttgaggggcggctttgttgggaaaggccactgactatcaatcaaaaaaggtataatacaaagttcgaacagcggctttctcttgttctttatggataccaaacataatactgacctcggaagaaccttggttgatcatttccaagttgatgttcttgcgggccaatgcagctgtgctgtctgcagtgatccccactcgttggcgcatcccttcgccgacgactacgaccatggataagtcgtgggtcattcgtaattcatctggatcgatctcataagcgatcttgcgcagcaattcttcttccaacaccggatttaattgattggctctcataatgatcgagatatcatcgattccggacggcatatgctcatagtttaaatcaaattctttgaaaatctcaaggacgcgtaaagtaaaaccaacttctcggttcatcaagtatttacggatgtagatcatacagaagccttcatcactagcaacaccgacaactggttgtgtcaagttgttccgttggttggtaatcatggttcctggatgtgtgggattattcgtatttttgataacgacgggaatctttgcccgataagaaggcatcaacgcttcatcgtgcagcaccgtgaatccggcatacgaaagttcccgcatttctcgataagtcagttctttgatgggttctgggtgatggacataacctggatgagccgaaaaaataccatcgacgtctgtaaagttctcataaagcgtcgcgttgacaccagcagctaccaatgcaccagaaatatctgatccgcctcgagagaaagtacagatttctccatcctccgtatacccaaaaaatcctgggatcactaaaatttcttctgtttctgcccaggcattgatttttgtgtaagatgctggcaagatccgggcgttttggggttcatcagtgactaagatccctagctcctctgggtttaagtaacgtgctgctagaccggatgcttgtaaaattccggcaatcaaacgagcgttattgtcttctccactagctaagatcttgtcatgaaaatgtgggtcatcattaggcgacaatgtcagaaactgctgtaaagcactttggatctctgccaataattcaggcgccacttgaaaaggggcagcgatggcagcataacgcgcataaatttctgttaataagggacggacatcttttgatgcagctagtccttcacaagtggctaataaaagatcagtcactttggtatcgtctgcatggcgtttaccgggggcagaaacaacaacaaaacggcgttgtggatctgcttggataatatcaactactttttgcacttgctcggctgaagcgagcgaactaccaccaaattttgctactttcatcttgcattactcctgttcaagcttttttctagagtacagtgtcaaaagtgagaaatcaaggcatttcttaaaaaaggcaccaaaaaacaggaaaaagcttttttgatttcggcttttccaaggaaatttagagagagcttgttaaaaaaagaatgaaaaattggaggaagtcgcaaaaaagtcaatcttttttgccgcaatttaatgcttgatttttttctttatgctataatctagcgtagatgctttttttgaaaagggacaagtgggtccttttatttgagataccttacatacccaaaaacggatctgtgaaaacgcggatttcatacgaaaagtgtagatttgaaaattggaggaaccataaaatgggaactaatatcatctttggaatcgttattgccattgtcgtcatcgcggcgatcttatatgcgatcggttactttatgcgaaagaaaaatcaggagaaactggatgtcttagagaaacgtaaagaaaacctgtttgatctgccggtcattgaagaagtcgatgaagtgaaaaaaatgcatttggtgggtcaaagccaaaacacattccgagaatggaaccagcaatggacagatatttccacctcctcatttgcggaactggaaagccaaatctttgaagtcgaagagttgaatgaacggattcgctttttcaaagctaaaacagcgatcgaacaagcggaagcaaccatggatgatatggaacgtcaagtcgaagagattcgtgccggcttgaaagaacttcgtgaaagtgaagaacgcaattccctagaagtccaaaaagcattggatgtttatgaagatttgaagaaaaacttgcgggagcatggagaggaatttggtccagcttataacgaactgcaaaagcaaatcaaaaatatcgagattgaattcactcaatttgttacgctgaatacttccggtgatccggtcgaagctcgggaagttttagaacaagcagagcaacacacctatgaagtcgaagatttgatgaaacgaatcccagctgcttatgaagagctgaatcgtacgttccctgatcaattaaaagaaatccaagatggatacaaaaaattattggatcaaaaatacgtctttcctgaagctaacttccaagaagatatcaaccgcgtgaaaaaacgggttgaaaattctatgaatgatttagccaaaacagaagttgcttctgtggaggtagctaatcgggatacagctagtgacatcgatgctttgtatacggtaatggaacgtgaaatcaatgcgaagaaatatgttcttaaaaatcgtcaagtgattgttgactacatcgatcatgcgacgaaaaacaatcgtcaattattgattgagttggatcataccgctcaaagctatacattgaatcataatgaattaggtcgggttcgtggcttccaaacagaagtcgatgaattggctcgccgcaacaatgaatacttgccgcagttggaaaaccatgagatcccttattcagaagtacaaagtttttataaagatgcttacaaaattttagatgatgtcgaagcgcaacaagttgaaatcgatgaagcgctaagtgatctacgccgtggtgaaaaggtcgcacaagagaaagtagagaacttcgaatttcgtttacgtaacctcaaacgttttgttgagaaacagcgtttgccaggcttaccaggggaatacttagaattcttctttgtcgcaactgaccgagtggaagaattaggcaaagaattgaataaaattcggatcaacatgcaagaaatcaataaattggtttcagtttgtgaagaagatttagacatgcttgatgaacaaacgaaagatttagtggatgcagctgcattgacagaacaaatgatgcaatatgcaaaccgttaccgtcattcacatgccgacatcaaagcagcgattgataagagtttgtatctgtttacgaaagagtatcgttatcaagatgcattagatgagatcgggacagctttggaacgcgtcgaaccaggtgctttcaagcggatcgagaacttctatttcaagaatcgtgatttagtataaagcaaaagccagcagtgaaaaactgtctggcttttttagtgaattggcggattctctaccgacaaatcgatccaagaagaggaacttcttgaaagagcaggaaagagcagttataatgggaaagaatttttcaaagaaagggtcctagcattgatttattttgataacagcgccacaaccgcaatttatccgcaagcattagatacatatgtaaaagttagtcagcgtattatcggcaacccttcaagtcttcacgatctgggcagtcaagccagccgtcttttggaacagtctcgggcgcaaattgctgagctgctgcaagtttctgcttcagagatttggtttaccagtggggggacggaaggagacaattgggtcttaaaaggcaccgcgatcgccaaaaaagcttatggcaatcacttgattatttctggcatcgaacatccagcggtcagtgagaccgcagaacagttgaaagaactagggtttgacgtgagtatcgcacccgttacttctactggatttgtagatgtcgctgctttgcagcaactgatccgaaaggaaacgattcttgtttctgtgatggcagtcaacaacgaaattggttcgatccagccaatcaatcaaatcgctgaaattctagaagctcatcctcgcatccacttccatgtggatgctgttcaagcaattgcgaaggttgatcagcagcaatggttgccacaacgggtagactttgccacattttctgcccacaagtttcatggacctaggggcgtcggttttatttattggaaaaaaggccgtaagctaacaccattgatgaccggtggcgggcaagaacaaaatcagcgcagcgggactgagaatttaccggcaattgttgcaatggctaaagcgttgcgactagcacttgaacaaaaagctgcccggcctaaccatgtgggcttattgaaaagttacctttcagaagcattatctgagtatgagaaagtgacggtgttttctggagccgaacattttgcgccgcatattctttgtttctcattggaagggatcagaggagaagtgcttgtccatgcctttgaagaaaaacagatttatctctcaacgactagtgcctgctcttcccgcaagaaaatggctagcagcacattgcatgcgatgcatgtccctagtcgcttagctacttcagcagttcgggtcagcttggatgaaagtaatacgatggccgaagtagaacaatttttgattgtatttaatcagctttatcaaaagttctcaaaattaagccaataagagcatgttgcgaacataccaacgacaaacaaaggagttttactcgtgaattatacagagatcatggttcgctacggcgaattatcaaccaaaggaaaaaaccgccgcagtttcattatgcagttggcggagaatgtgaagcgaacacttgccgactttcctaaagtcaaagttcatgcagaacgtgatcggatgcatttgcttctgaatggggaagacagtcaggcaattatattgaaattgcaaaaagtgtttgggattcaaaatttttctcccagcattcgggtagaaaaagacgtcgaagtgttaaaagaagccgtacaaacagtgatgagtgaaatctatacagggactgagaccttcaaaatcactgccaaacgcagtgaccatcaattcatccaagacagtaatcagttgaatttgacgttaggaaatgctgtaattgatcgctttccagaaatcaaagttcaaatgaaaaagccagatatcaatctacgggtagagatccgtatggatggagcctacctttcttacgagacgatccaaggagctggtgggttaccggttggaacgagtgggaaagggatgctgatgctttcaggcgggatcgattcccccgttgctggttattttgcgatgaaacgcggggtagagatcgaagcggtccattttgccagcccgccttatactagcgaacaggcactacaaaaagccaaagatctgacaaagaaactaaccccttatgttggcggtattcagtttattgaagtcccattcactgaagttcaagaagaaatcaagaagcatgtgcctcaaggctattggatgacgatcactcgccggatgatgctgcgactcacagatgcgatccgtgaagctcgtcatggattgattattttgaacggagaatcactaggccaagtggcttcacaaacattgcaaagtatggtggcgatcaatgaagtaacgaatacgccaatcattcgtccggtggcaacgatggataaattagaaatcattgatgtagctcaagagatcgatacgtttgaactggcgatccagccatttgaagactgctgcacgatttttgctccgccacagcctaagacaagaccgaagttggagaaagtgcatttatatgaagagcgcttagatatagcaggcatgatggagcgggcattagctgggttgaaaatcgaagagatccaagcttccgaaaaagcagaattcgctgattttctttgatcttcacatcagaaaaaattttgatatcaggggataaaaaccagctgttgactgttggcaattaaagaaaaaagatggttacaaagggtgtgcccaagtagccgtcttttttcgtttatgctggacctgtgagagatttctcacagtcgtttgactggaatctaggaagcattaaaagtttgtgaaaattgcttgctattcaatgacgagcatgctaaactcgatatgtgaactatttaacaaggaggacggaaaccatggaagcattaagagaaaaaaaacttcctaaagcaacagcgaaacgtctgcctgcttatttaaggcatttaaaatttttggatgcatcaggtgtccatcgaatcaaatcaaaagagtttgctgagatcacacaagttccttccgcaacgattcgtcgggacttttcccacttaggggaattaggacgaagcgggtatggttatgaagttccttacttgattgaagtttttagccatatattagaaacgaacgaagcaaagaacattgcattagtgggctttggcaatctaggtaaagctcttgcaaataacaactttcgccgcaatgagaatctttcgatcgttgctgtatttgataatgatccgcaattgatcggtaagaccatcgacggtcactatgtttatggaatggatcagctagctgagatcgttcaggagaaaggaatcactgtagctatctcgacagtacctagtcaatattctcaggcggcaatcgatacgatcgtagaatctggcattacagcgattttaaattttgcccctgatcgcgtcaatgtacctaaaaatgttcatatccaatacatcgatctgacgacagaattacagacgttgatcttttttgacaatacctattctcagaaatcgtaggttttgagcaaaatcttttggctttcgcgggttctctcctatactggagaaaactgtaataggagagatgacatgcaagtaacacgtaaaggaaccatttttgaagtaccaggcattcagccaaaagtaggggatcaagccaaagaatttgaactgaaaagtttagatgacaaagtttatcgcttggctgatttcttaggtaaaccgacgatcttaagcattgttcccgacattgacacgcgggtctgtgcattgcagacgaagcgcttcaatgaagaagcaagtaagattgatgaggttaattttgtgacaatctcgaacaatacgaaagaagaacaagcaaattggtgtggacaagaagggatcgatatgctgatgctgcatgatccagaaaatacgtttggagaaacctatcaaattatgatcccagagtttggacattttgcccgcgcgatttttgtcttagatgaaaaaggggtgatccgctacgaagagatcgtgcctgaaatctctcaagaaccggactatcaatcggctttggccgctgccagatcaatcgctgtttgactttcaaaaaagttcattgtagaatgaacaagatcaattgaaagaagacgaggatcaagaggagtatcagacggactgtttttacagagagaagaccaattggtgcaaggttttcagcaggaatctgagaaggtagcttgtgagtctttgattggaacagcaaggaacaccttgttcagtagaatcaaacgcttcgtgaccgttaactcacgcccaagaggtagagaaatctacaatttaggtggtaccgcgtatttgcgtcctaaaatgcttcggcattttaggactttttttattcccaaaagccgagcggtcttgaaggaactgatcaaaaaaagtaggaggtaaaacaatgtccgataacttatcaacaaagtacaacccgcaagaagtcgaagcgggacgctaccaggaatggttagccaaagatctattcaaaccaagtggtgatcaaaaagccaagccttattcaatcgttattcctccgccaaatgttactggtaaactacacttaggccatgcgtgggatacaacccttcaagatatcatcattcgccaaaaacggatgcaagggtttgatacattgtggttaccaggtatggatcacgctggaattgcgacacaagcaaaagtcgaagaaaaactaagagaacaagggatctcccgctatgaccttggtcgggaaaaatttgtcgaccaagtgtgggaatggaaagaagaatatgcaggccatattcgtgagcagtgggcaaagctaggattgtctcttgactatagtcgagaacgattcacattagacgagggtctgtcagatgctgtccgtaaagtcttcgtaactctttacgaaaaagacttgatctatcgcggcgaatatatcatcaactgggatccgcaagcacgtacggccttatctgatattgaagtcatccataaagagatcgaaggagctttttaccacatgacttatgaactggcagatggttctggtaccgtagagattgccaccactcgtccagaaacgatgctaggagacactgcgatcgctgtccatccagaggatgaacgctaccaagaattgatcggcaaaaaggttattttgccattagttaataaagagatcccaatcattgcggatacttacgtggatcaagaatttggaaccggcgtagtaaaaatcacccctgcccatgatccgaatgactttgaagtcggtaaccgccataacttgccacgggtcaatgttatgaacgatgacggaaccatgaatgatttagccggtaaatatgctggcatggatcgttttgcagctcgtaaagcgatcgtcaaagatttggaagatatcggacgtttgttaaagattgaaaaaatgattcacagtgttggccattcagaacgaaccggtgtcgttgttgaacctcgtttatctacgcaatggtttgtcaaaatggggccattggctaaagaagcgatcgacaaccaatcgacggatcaggcagtcgagtttttcccaccgcgcttcaatcaaactttcttgcgctggatggaaaatattcacgactgggttatttcccgacaattgtggtggggacatcaaattcctgcttggtaccacaatgaaactggtgaaatgtatgtgggcttagaagcaccggcagatgccgaaaactggacacaggatcctgatgtactggatacttggttcagctccgcattatggccattttcaaccatgggctggccagatgaaaatagtgctgattatcagcgttatttcccaaccaacacgctagtcacaggctacgacatcattgctttctgggtaagccgcatgattttccaaagcttggaattcacaggcaaacgtccttttgaaaatgtgctgatccatggactgattcgtgatgaacagggacgtaaaatgagtaagtcattagggaacgggatcgatccgatggaagtcatcgaaaaatatggcgccgatgcattgcgctggttcttatcaaatggctctgcaccaggacaagatgttcgcttcagctatgaaaaaatggatgctgcttggaacttcatcaacaagatttggaatgcgtctcgttttgtcttgatgaatgttgaaggaatgacggtgacagatattgatttttctggcgagaaatccgtagcggaccgttggatcttaactcgtttaaatgaaacgatcgagaaagtgactgagttgtttgatcgttttgaattcggtgaagcaggtcgccagttatacaactttatttgggatgacttttgtgactggtatatcgaaatgagcaaagaaaccttatatggtgaaaatgaagcagctaaacaagtcaataagagcattttggttcatgtgttggatcaaatattacgcttgctgcacccaatcatgccgtttgtcacagaagaaatttggagtaaactgcctcatacaggcgattcgcttgtagtagctgcttatccagaagttcagccagagtggtcggatgagaaagcagcacaaggaatggaagtgttaaaagagttgattcgttctgtccgcaacattcgggcggaagtcaacacgccgctttctaagccaattacattgctgatccaaaccaacgatgttgagatcgagagcttcctgatcaccaacaaaaactatatcgaacgattctgcaatccagaagagctagtgatttccaatacactggaagcaccggaattggcgatgtcagctatcttatccggagcaacgatctatttgccattagccggcttgatcaatatcgaagaagaaatcagccgtttagaaaaagaattggcgaaattcaatcaagaggtcaaacgcgtgcaagggaaattagcaaacgaacgtttcgttgccaatgcccctgaagaagttgtggcgcaagagcgagcgaaagaagccgattatttggataaacaaaaagcagttcaagaacggatcgagcaattgcgtacgattcaataatctatttattgaatcgaggcagcaagctaatcatcgatattcctatggaacactagctgttgcaaattaccgatctaactatttactctctaactacccgatctctagctacccgatctatagaggaaagaattcctaaccgctatagatcgggtagttttcctatcgatttttgttgggaacgctctgagagaaagagcagtagaattaggaaaaaaagggaagatttgctaaaatgattttgaggtgaagaacatgacaagtgaagaagcaattgcatggatccacggaagaaagaccttcgggatgcgtccaggattgatgcgagtagaagcattgctacaacgattaggcaatccagaaaaaaatctgacattgatccatgttgccggaacgaacggcaagggttcgactgtcagctatttacgaagtcttctagaagaaagtgggctgcaagttggaacgttcacatcgccccatatcgagtctttcaatgaacggatcgagattgatgggcgttttataccagatgactcgctgattgaatgggtcgaaacacttcaaccactcgtcatgcaactggatcaggaagaagaattgaccggaatcacccaatttgagattttgactgcactggcattcggctactttgcccagcaacaagtcgatgtggctatcatagaagttggcttaggcggccgtttggatagtacaaatgtgatcacaccaatcttgacggccatcacgactattggaatggaccatatggatatgcttggtgacacgattgaggccattgctgcccataaagccgggatcatcaaacccaaggtgccactagtgactgggaagatccctgaaagtgcgctatccgtaatcgaccttgaagctgcagaatctgaggctcctgtatcccacttgggagaagactatcgagtcacgtatcatcgtccggatgaaatctggggagagtggttcgattttgagaatgaccgcggaaaaatcaaaggactgaaaacgccgatgattggtcgacaccaaccagaaaacgccggtgtcgctattcaattatattatttattctgtgagttaaaaaaactgccattttcggaaaaagtagtccgcaatggcttaaagaaagcttattggcccgcgcgaatggagaaaatcagcaatgaaccgctgatcattatagatggtgcgcataacacgcacgccatggaacgcttggttgagacagttagagaagaattcaccaactatcgcatccatatcttgttttcagcattggagacaaaaaatgtcgatgagatgctgcaacagctgttaacgatcccgaaagctgaaatctatttgaccacatttgattttccaaaagcgatccatttaagtgatgattaccagcaattgaatgaagcgcgcatctcgatcgtttcactatggcagtttggcttagcagaattattagaaaaaatgaccaatgaagacttgcttctgatcactggttcgctttattttgtatcagaagttcgggaacttttgttgggaatgggaggaagaaatggctgaattaaatggtgtgatttttgatatggacggactgatttttgatacggagcttctttactatcaggcaacacagatcgtggccgatcagatggagatcccctatacaaaagatgtctatctagcatacgttggtgtttcagatgaagaagtctgggcggcttatcatgaacgatatgatgctgccttcggtccagagactgttgatcgtttcatccaagccgcttttgatcaaactctgctgctctttgagcaaggtcaagcagcattaaaaccgggggtccatgacttgctgcgctatttggatgaaaaagggattccgcggatccttgcttctagcaaccaacgacgagtcatcgatacattgctggattccgcaggtctgacgcaagaatttccagaaatcgtttgtttcgatgatgttgtgcgggcgaaaccggatcctgaaattttcgaaaaagcccataatcgcttaggggttccgaaaaatcaattagtcattcttgaagattccgctaacggtattcatgctgcgcatgcagctggcattccggtgatcatggtacctgatctggttgctccgacgtcagtgatcgaagaaaaagtgctgcatatcttgccttcactggtagaagtgccggattattttgagcaggcctatacttggtagtgtcgcatcaaccatgaactcttttgcgtagttttattttagactaacgcaaaggagttttttttatgaaagacaatggaattcctcaaagttcctatcctcgagaacgactattgcattatggcgctgaagctttatccaatcaagaattgttagcgattcttttacgaacgggttctcatcctttcaatgtcatcgaactagctggtcagatcctcaacgagtttgaagacttgtatgagctaaagcacgtgacattggacgaactgcaggccattcgtggggtaggccagatcaaagcgatcgaactcaaagctaccgtagaacttggcgcccgcatccaacgagcagcacagccaaaatatggcagagttcattccagtgtggatattgccaatcagatgatggaggaattaaaagattaccagcaagaacatttgctgtgtctctacctaaataccaaaaatgagatcatccaaaaaaagacgttattcatcggcagtctcaatcagtcgattgctcatcctagagaaatttatcacggagcagttcgttgctgtgccgcccgagtgatctgcgtgcacaatcatcccagcggcagtccccaaccttcgcaggcggatattacctttaccaaacgattgatgaagtgtggggaattgatgggtatcgacttgctggaccacttgattatcggcaataattcatatatcagcttgcgagaagaaggactctgggaaggctgatcgtctaccttgcaaaaaaatagtagcaagtgtaaaatattagtgtaattttgtttgctgaatagatgttgaaacgcttgttacacctctatcggacacgagcaatgttacacataattaagtgcttatgcacgaggaggttttttataatggaacaaggtacagttaaatggttcaatgctgaaaaaggatttggcttcatttcacgtgaagacggtacagacgtatttgtacatttctcagcaatccaaggtgaaggcttcaagactctagaagaaggccaagcagtgacttttgatgttgaagaatcagatcgtggacctcaagcagtaaacgtaaacaaagcgtaagcttatttacaagactgcattcatgggattagtgaaggcacagtcaaaaaagaccatcattcagatggtctttttttttgctcgcgttctttgacaaaatcaatgaacgtgaggatttctttgattccttcttctgagattgattcatcgacatgggaactgatcaagtcactttctactttaggatagaggtgtctcttatcagatcggcctaagagatagtcggtcgacacaccaaatagatcggctaacacttgcagcatgctaaagtcgggctctctttttcctgattcataggcagtataagctggacgtgtgataccgattttgtctgccacttcttgctgagttaacttcttttccagacgtaatttttttatgatttgcggaaacataatgacacctgcctctctcgtgatagtaacacaccgttacttagaaaaaaagagtcggttggtgtctatttgttactaaatgtcgttgacaagtgtcataaggaaacatataatgagtgtgtgtcgaaacgttacattccgaagaaggagggaactgtatgcgggagtggctcattaggcaacgtgaaaaaaatggactcactcaggatcaagtagctaaggaatccgaaattgagcgaacatattacaatatgattgaacgaggaaaacgccgaccaagtgtagaagtagcgaagcggatcggtaaagtgctccaatttgattggacgtatttttttagcatcgaaggtaacataacgacacaaaaagacaaacctagttaaatggaggaggggactcaagatgcctgtaaaaggtacagttgcaaaaagcggctatctgggtaaaaacaaaagaaatttccaggatctaaaaaaagatttaaagaaacacaagtggctctacgtcatgctgatcattccagttatttttgtcgtgatctggaattattggccaatgtatggcgtgattatcgcattcaaagattattctcccgcatttgggatcttaggtagcccttgggtgggattgaagcactttgagcgtttttttgcttcctatttttttctcgagatcattgttaataccttgcgcttgagtctttacagtttgttggtcagtgtaccattaccgatcattttggcgttattattcaatgaattgaatcggaaatggttcaaatcaaccgctcaaacgatttcatacatcccaaattttatttcggtggttgtcgtgatcgggatggttcaattctttttttcaagtcaagatggcatgattaatatgttgctgaatacatttgggtttccatcgatcgattttctcggaagtcctaaatggtttccgcatatctatgtgtggtcgggtgtctggcaaggtgtggggtggggaacgttgatttatacggcagcgatgtccgggatctctcccgatcaatatgaagccgcttacttggatggtgcctctcgcttgcaatgtattcgtcatatcacgattccttccatcatgccgaccatcgtgatctccacgatattggcgacaggaagcattttatccgtgggctttgagaagacttttctcttacagaacgctgcgaatctcgcttcctctgaggtgctttcgacatatacctataaaatggggatcataaatggggagtatagtttctctgctgcagtcggtctttttaataacgtgattaattttattgttttatttattgttaataaactagcacaaaagacaaatgaatcgagtctttggtaggaggaaaacgaatgaaagtatcagcaacgaaaggggataaactgtttaatactatcaatatcttactggtcagtctgattgccctgattatcttatatccgcttatctttgtggtcaatgcttccttcagtgatcccactaggatctatgaggtcccgttgcttttgtatccccgtggattaaatgttgaagggtacaaggaagtgctcaagagcagtgatatctggacgggttttcgcaacgcagtgatctacacgggtttagggacagtgatcaacttaatcgtcacgacgattgctgcctacccattgtctcgttccggcttacgaggcaagcgtttctttactttattttttacgattacaatgttttttagcggagggttgatccccacttatttagtcaatcagcagttagggatcgttaacacactttgggtcatgatcttgcctggagcgttgggtgtttataatatgattttgatgcgtacgtatttcagtcaaaatattcctaatgatttgattgaaagcgcttatatcgatggtgccaacgatttatggttattatggaaagtcgtcttgcctctggctaccccgatcatcgcagtgatggcaatgttctatggtgtcggtcgctggaatgcctactttgacgcgttgatttatttacaggatcgtgccaagtatcctctgcagattattctgcgagaaatactggttcagggacagtttggccaagatatgaaccaaatcattgccggtagtgcggaatccgaactgcttatgctgaaaatgaccctcaaatacagcgtagtgatcgtttcaagtctgcctgtgctcctattttatcctgtggtagccaaatactttgaaaaaggcatcctagtaggatccatcaagggatgaggaggtgtttcgatgctaaaagcgatcgctgcattttgtgaattagtgtacgatatgatgcttttgaatgtgtattggtggcgctacatgcttctgggcggtgtgctgtttagtctgataccggcaacgattactgtctacgattgcattcgaaaaaggattctgcagaaaaatgaagctcctctcaaagaaattttttcagatcaatatcggcacaacaaacaaaaaaatcgctggtttcatgttgcggctattgttctgactggttttgttattggggttcatcacacattagcgagtgattatcccaccaatttcttgtttgagtttacgatgcggacgaatctcctgattattttattgctggcgatcacatttttccctgtgcatgcttatttttcattagacaaagtccatcgttggttacagccgttactgtttgtgttcatttgtcccgttcagctattaataagtatgggacttcttggattggttagtcttctttattgttactatccatttttagggatctgtttagggatcggattgcctgcttatgggataggtttcttgtttttcaataaatttaacaaaatgaaaggagtctatttttgatgtcgcccgttgttcgattgtataaaaaggagagaactgtatgaaaaaaggagtgctattgtttttgttgtccttcgtctggctgttgtcggcttgccaatctagtccaagtgaaaaagtagcagatgacgtaaagtcgattcatttaatgaggaatgattttacagacgtgaggccgaaaagcgaagacctgtggatgtggcaagagtacgagaagaagtctggagtcaaagtacagtgggaagaagtaaaagagtttggggaaaagaagaatttgattctatcaggaaagctgcctgatgccttttatcagaccggctggagcaatgatgagatcgtgaaatacggacagcaaggattgttcattccattagaagatctgattgccgaacatgcaccgaatctgcaaaaaatcttagatgaaaatccgattgtcaaaaagacgttaacagcaccggatggtcatatgtactcgctgccgtatatgtctttggatccaatgagcggcgggcgaacggttcgactgtatatcaatcaaaattggctggatgaattgtccttggatgtgcctcgtacaacagatgaactgaaagaggttctagctgcttttgtagcgagcggggaaggacgagaagggtattatatgccaagtggctggttagccggcggactggaaaaggtcttcatggcttcctatggattggggacaggcggcagacaggcgatggggaatatgctgtttgtggatgaagcggggcaattacagttgaccatcaaccatgaacggatgcgggaagtctggatgtacctaagagagttgtatgcagaaggattagttgcaaaacaatcctttgccggcgtggatgatgacaaatggcgagcggatgctgcccaagacaaagttggtctcttccagtgggtcgatcctgatttcattggcccatttggaccagaaacgtatacgccgatcaatgtcattgaaggaccttatggcgacaagacactttatacggaaccgcctgtttctggtacttcagcatttatcattacgaaggatgcagcagatccaggattacttcttgagtgggtggattacttctatagtcctgaagggcagatttttgcttatttaggagaagaaggagtgacctatgaagttgacgaagatgggcacatggtctatattgacgaaatcttaaactatcaaaacgggccgcaactcggtgctttccagtgggtcgataatgtgtatggaggctatttcccttatgcggaattggatcaagaaatcagagatcgagcgtttggcaaagaaccggctgtctatgatgatgtcaaagaagaatatatgccggaatacatgctgccgacatttatggcaaccgaagcagaagcagcagaattgtcaacgatcgttacagatatctcaacccatgtggaacaatcgcgggtaaagttcattacaggtgaatggaattttgaaaaggattggaccaactatgtgcagcaattggatcgtatcggtgctcaacgcttattggagatccgtcggcaacaatttgaacgctttaatcaagactaacttaagggcgaataagcagtaggaaaaccaagtgaatgccaaaggagcagaacaaaatggattattttatgcaagaagcaaaaatcaagcaccgcattcaagaaatcgaggcattgaggtatcgaaacaagcgtcagatccagcaatggtttgtcacagaggatcagacaaagtgtcagaaatatccgccactcttttcgactgaacaagtcatgcacataggggaaacgtggcaaggaagggatcgctatttatggcttcaagcgaaagtcaccattcccccgaagatgaatatattgttttttgattttggaaaaactggtggcggcaataactctggttttgaatcacttttatttattgatggtgtccctgttcagggaatcgacgccaaccacaaagaatttctattagaacctgcaaatttaggaaaagaagtgatcgttgcgctgaagctatggtctggattagaaggcggtggcgaggaacgacagctgattcatgaattgaagtctgcatttgtcggttgtttggatgaagaagccaacgattatttttatctttctaaaatgattttagaaacgatccagcaattagcagaggatcatgaccggaaggttcggctgctcaagatgttgaatggttcgtttcaacggatcgattggcgagaaaaaggatcaccgcagttttatgatagtttgcgggaagcacatctttttctaaaagaggcgctgcaagcacttcccaaaagtgacttggttcaagtcacagcgattggacacacccacattgatcttgcgtggctttggcagttgaagcacacgcgtgaaaaggcggcccgcagcttttctacagtcttgaaattgatgaaagaatacccagaatatgtgttccttcaaactcagccgcaaatttaccaatatatcaaagaggactatcctgaattgtatgtgcaaatcaaacaacgaatcgcagaaggccgctgggaagttgatggcgccatgtgggtcgaagcagattgtaatctgcctagtggcgaatcccttattcgccagattctctacggaaaaaagtttattcgcgaggaattcgggcgggaaagcacctatctctggctgccggatgtttttgggtattcatgggcgttgccgcagattctgaaaaaaagtggaatcaatacctttatgacgacgaaaataagttggaatcaatacaatcgcatgccaaacgacacctttctatggaaggggatcgatggctctgaaattttgacgcatttcatcacgacacccgttccagctggtggcagctggacagaaaaatccaattggttttacacgtataatgggttgctgaccccggagacggttttaggagtatatcgcagctatcaaaataaagcattgaatcaacatctattgatttcctatggacatggagatggcggcggtggtgtcacccgagaaatgttggaaaaccgcagaaagatggctgaaattccgggattaccgatgcttaaaacgggtcgggctgctgacttttttgaagagttacatgaaactgtcgaccaaaattcgaacgatctaccaatctgggatggggaactgtatttggagtaccatcgcggtacctatacttcgcaggcctttatcaagaaaatgaatcgctggtttgaaatacgcttgcgggaacttgaatgtttgtacagtcttcagtctatgacagcaggaacggcttatcctgctgcagtattcgaaaagctttggaaaagcgtcttgaagaatcaatttcatgacattatcccgggctcttccatcaaagaagtctatcaagattatcggaacgaagcacttgcttgtcaaaagcagcttcatgctctgacaactgctcttgagacagaagaacaacaattacgtatcatcaatacagccgcttggcagcgaacaagcatcattgcagtagcaccgggcacggtacctgaacagcagcaagttttcttcgacggttcctgttacgctctggtacatttgccagcattccaagcgagtcttttgccggattgtatctgtgcgttgccattggaagcagtgtccgttagtgaaaaagaccgactcgagactccgttttatcaagtccgatggaatgaggcggggcatttgacccagatctatgacaaaaccgcacaacgagaagtgcttgctgggacagggaatgtctttcaattatttgaagacaaaccattgaatttcgatgcgtgggatatcgatcttttttatcaagaaaaaggcacggagctaagcagtgcaggcattcaagtcatcgcgaacaatcctttgtttactgtcttagaacagcaagtcacttttgggcagtcaactattttacaaaaaatctatttctatgctcatacgaagcgaattgattttgttaccacggtggattggcaagaacgccagcaattgttgaaagtgaaatttgatgtcaatattcgcgcgacagaagctatttttgatattcagcatgggaatgtgaagcgtccaactcactggaacacgagctgggatatcgccaaatttgagacagtaggtcatcagtgggcggatgttgcacaaatggattacggggtggcccttttgaacgactgcaaatacggctacgatatcaaaggcaatcagctgcgattatctttattaaaaggagcaacatacccggatcctcaggcagatcttggttcccacacgcttacctacagcctatttccgcatcaaggagattttgcaactggtcaggtgatggaagaagcttgggagatcaatgcaccattgagtcaacttcaaacagagatggcaagtattcctcttgaaatcgaggctgatgaaagtttgataatcgacgcattgaagttagcggaagatcaaagcgggtggattttgcgttgctatgaccatttagggagcgatcgcgacgtcaccattcactgtcatggaactggcaaaattcgctggcaagagacgaacatgatggaagaagctagcgaagagttaaaagcggagccgatcgcattttcattgcatccatatgaagttaaaaccattaaactggtgcttagcgaaaagtagatagttctcctgaagagatgtatcggtgagatcacttcttagatcgtttttaagacagtttttaatatagcctccaatatagctaagtttccaaagtagttttaaatagctgtggcaagagacagtaccgataatcctgcgtccaatttcgaaagaagagagtcttaaacctaaggaagtcagtaggatgaaaaataaaaaactcgaccacttccattgagggtttggtcgagtttttttgttagtggtcgtcaggtgtcatgatcatcgaaagaatcattgggtgacgttctgttttttcaaataagaagggttgcaaagcagctgacatggcttctcgcattttatgttcgctaggatctggctggttcaagacttctctgagggcacggaacaggatctgttgtgcttcattgatcatctcgccagattcccgcatatagacgaatccgcgggaaagaatgtctggtcctgctaagacttcttttttcgtcaagtcgacggtggctacggctagcactaagccttcttctgataagatacgacggtctcgtaagacaacgttaccgatgtcgccaattccactaccatcaacatagacatcacccgcattgaaatgacctgctcgacgagcagaatctgcagttaacgccagcatatcaccgttttccataataaaacagttctcttttggaacgccgacatcttgtgccagttgggtatggatattcaacattctgaactctccatggaccggcataaagaacttaggcttcatcaaacgaagcatcaatttttgttcttcttgaccaccatgtcccgaggtatggatattattcaatttcccgtggatcacatgtgcacctgcttctaacaacaagttgatcaagtggttgacactagtcgtatttccagggatcggtgaactagagaaaatgaccgtatcgtctggatggatctgaatttgtcgatgagtaccattggcgatccgactaagggctgccattggttccccttgagagccagtacataggatcatggtttcattagctggtaagcgattgatctcatgagattcgacaaatgtaccgtcagggactttgatataacctaagcgctgcccattaacgatcgcattttccatacttcgaccgaagacagcgatcttacgacctgtggcaaccgcagcatctgctgcttgttgcaaacggaaaatattggaagcgaagctggcaaagatgatccggccttcgattttttcgaaaatcttgcggatcgaactaccaatcgttttttctgacttggtaaaggtcggaatctcagcattggtactgtcagaaaggaggcatagcacacctgcttctccgattctggccattttgtgtaggtttgctggttcgcccacgggtgtgaaatcgaacttaaagtcaccagttgctacgatatttcccgaaggtgttttcaccacaacgcctagcgcatcaggaatactgtgggtcgttcggaaaaagctgaccgatgttttgcggaagcgaatcacggtatcttcattgatctcatgtaatgtagcatctcgcagtaacccgtgttcatccaacttgttggtaatcaaagccaatgctaatggaccagcatagattgggatatttgcttcacgcagaaggtaaggaataccaccaatatgatcttcatgaccatgagtgatgactaaccctttgactttcgtgatgttttggacaatgtagctataatcggaaatcacatagtcgattccaagtagttcatcttccgggaatttgatcccggcatcaatcaagatgatctcgtcttggaattgaaccccataacagttttttccgatctcgcctagtccgccgacgccgaatacgccagtttcattattttttagagaaactttcattattaaaactccgctaatttgaaatcagcgttctctttttcatacgcaagatgtttttcatcaagttcttgaataaactcgatgttatatggggtgttttgttcgactgtacggcgtgcagcaaccgcgctttctgcgtcaatgtacagggaatgggtttgttctctttttgggttgcggtcttttgtttcttgatagtaaactttgtaaatcatacaaattctcctttatctgctaatgcagtagtttatcgttttgttcgattcggtgcatcacaaaatcaaggccctagataagtgacctgaaaagtgggggtcgtcagtggaccgctacatgctttttccagacaatcgttgtgagaaaaaagagaaagcctcgtctttgctttccaaatgttgtcataaaaaattcaccggtttttgtaaatcgttccattacaagtagtattagtttatcatagaaaagtaaataagtatagaaactagttggtttgaaagggcttcccttggtcatccttaaaaaaatactttaaaatatctcctttttttcttcgggaagtgggttacttgaaattgggactatgatatagtaaaaataatgtgtaaaaaaaggaggggcttttttgaaattaatgtggcattacacaatgcgcaataaaaaactgttggtttttaatttcatctgtgtgtttggatttattttgattgaactaggattacccacattgctggctcgaatgatcgatgtcggtattcgaaatggtgaccgagagtatatctggaagatgggaatggcaatgattgctattactttgacagggatcgcaatgaatattatgttagggtactttacctcaagaatcacaacgaatatcgtagcagatgttcgagatgatctttttgaaaaggtgcaaggttattcacatacggaatatgaaaaaatcggtgtttcatccttgattactcgggtgaccaatgatgcatatcaaatcatgttgttcttgcagaatattctgcggattggattgatgacgccgatgatgtttgcggtcagtttgtatatggtcatgcggacaagtacaaaattagggatgtatgtgttaggggcactgccgatcttgttgattgctgtgatagccatcgcaaagatttccgagccgttgtctaacaagcagcaagccaatttggataagatcaatggtattttgcgggaaaacttgtctggtttacgggtcatccgtgcgttcgtaaatgagaaatttgaagagaaacgctttagcaaagtcaatcaagcgtatgcatccagctctcgcagcttgttccgtttgatggcgacagcacagccgggctttttcttcttattcaatatcgtgatggtactgatcatttggtcaggaagtattcaaatcgaaaatgggcaactgcaagtcggtgacttgattgcttttatcgaatacatcttccatgctctattctcattcatgttgtttgcgactatctttacgatgtatccacgtgcagcggtctcagcccgacggattcaggaggcattggatatgacttcagaaatcgtggaagccgaacagccagtgacagaaggcaagaccaaaggatatgtggaatttaagaatgtgacatttgcctatccgggacatgctgagagtcctgtgatccgcaatgttagttttactgcttctcctggtgaaacagttgctttcatcggcagtactggaagcgggaaatcaacattgatccaattgatccctcgtttttatgatgtcacaaaaggacaggttttgattgatgggatcgatgttcgcgagtacagcttgtccgctttgagaaataagattggatttattccccaaaaagcgttgctgttcactggaacgatcgcagaaaatctgcgctatgggaaagaagatgcgacacaagcggacttagaacgtgcggttgagatcgcacaagcagctgattttattgctaaaacaccggatggctttgatgcacgtctagcagaaggaggcacgaacttttctggtggtcagaaacaacggctggcgatcgctcgtgcggtgatccgtcgtcccgagatctatatttttgatgatagtttttctgcactggattatcaaaccgatgccaaattacgggcgcgtttgaaaaaagaaacgaccgaatcaactgttttgatcgtggcgcaacgtgtggggacgatcatgcacgcggataaaatcattgtgttgaatgaaggcgatgtagttggtatcggcacccacaaagaactgttggaaaactgctcggtttattacgacattgcagcatcacaattatcagaggaggagttggcacaatgaaagcattctcttctttaaaacgtttagggcgctacatcaaaccctacaaagtctcctttattttagtcttactttttactgtcgctacagttggctttaacgcggcattgccgtatgtgtccggattgcctacaacagagatcagtcggaatattgcagcgggagagccgctgaattttgattacatcatcgtttgtttgatctggatcaccgttgtcggtgtagggtattgtttctcacaattaatgtcagggcttttgatcacaaatgtcgttcaatctgcgatgcgtgatttacgtcaagacattgaagaaaagatcaaccgcttgcctgtttcatattttgacaaaaatcagcaaggaaatatcttgtcacgggtaacgaacgatgtggatgcagtcagtggtgcgatgcagcaagccttgatcgggatcgtcaatgcctttctaggaatcatcatggcggtagcgatgatgttttatatcaattcgtttatggcgttgatcgcattgatcatgattccaacgtcattgatcatttcaagaacgatcgtcaagaaatcgcaaaaagacttccaaggcatgcaaaatgcattaggagacttgaacggttatgttcaggaaaatatgactggtttcagtgtattgaaagtctatggacgagaaaaacaaacacttgacggctttaaaaaagtcaatcaccaactgcgctattacggcttccgttcggccttcgtctcgggattgatgatgccgttagttcaaatgactgcctactttacgtatattgctatggcagttatgggaagtttctatgtaattggcggtgtgatcgtggtagggcaactgcaagcctttatccaatacatttggcaagtgagtcagccaatggggaatattacccagctttcctctgtcttacaaagtgcttcggcagctgcaaaacgggtttttgagattttggatgaaccggaagaaccagtcaaccaaacagatattccattgccagcggaatttcatggggatgttcaatttgaacatgtcggttttgcctatgatccgaagaaaccgctgatcaaagatttgaactttgaagtgaaagctggtcagacggtagcgatcgtcggaccaactggagccggaaagaccacattgatcaatttgttgatgcgtttctacgatgtcaacgaaggggcgatcaagattgatggtattgatacgaagaaaatggcccgcagcgatgtccgttcgttattcggcatggttctgcaagatgcttggttgtatgaaggaacgatcggagacaatattcgttttggtaagttagatgcgaccgattatgaagtggtcgatgcagctaaaacagccaatgtggatcatttcatccggacgatgccggacggttatgagatgtttatcaattccgaaggggataatatctcgcttggtcaaaaacaactcttgacgattgctcgagcagtcatttctaatccgaaaatcttgatcttagatgaagcaacaagctctgtggacacacggctcgaagcgttgatccaaaaagcgatggacaaagtgatggaaggacgaaccagtttcgtcattgctcaccggttgtctacgattcgggaagccgatttgatcttagtcatggatcaaggagcaatcatagaaaaaggcaatcatgaaacactactggcagctgggggattttacagtcagctttatcagagtcagttttcagaagaagcagaataggtcaaaagagtgtggtgtcagccgcactcttttttttgtatgaagtgtgaagatatccgcatatagtcgctgttctcttacggactgattcgtggttttcatagttattcatggtatcatgggtacaggaatagagtagtatagtagtaaagtatagtagtaaagtgtagtagtaaagtgtagtggagaaagaaaaatcctaaaggagtttaacaatggatcggaaaaaagagacaaatagccaaaaacgaaatcaactaaacgcagaaactgctagtacgcaaaactttatcgcgccaaatgcgactgtcgtcggagatgtcaccatcggcagtgaggcgactgtctggttccaagcagttttgcggggagatgcaaattatattcgagtaggtgagcggaccaatattcaagatgggacgatcattcatgtggatcatgatgcacccacgatcattgcagaagatgtgactgtcggtcatcagtgcatgcttcatggctgtaagattgaaaaaggggccttaatcggcatgagttccattgttttgaaccatgcagttatcggtgaaaacagtttgattggtgccggttctttagttactcaaggaacgatcattccgcccaatgtgctggcttttggacgtcctgctaaagtgattcgtccgttgacagaggaagaaattgccaaaaacaaagccaatatcgcccattatgtttccttgggaaaagactacttgcaagggaaatatgtttattaatggcaagcgaagtcaatcggatctcgtttaatgacgcaaaaaaaccagcgtgcttcagcacagctggttttttgatggatgaattattttaagctgtttgattccatgatctcgtcgatcaagccgtaatcttttgcttcttgagcagtcatgaagttatcacggtctgtgtctttttcgatgacttcgattggttgacctgttcgctcagacaagattttgtttaggcgttcgcgagtttgcaaaatgtgacgagctgcgatttcgatctctgttgcttgtccttgtgcgccacctaatggttggtggatcatgatctcagcatttggcaaagcaaagcgtttgcctttttcaccagctgtcaataagaatgaacccattgaggcagccatccccataacgatcgtttgcacgtctgctttgatgaagttcatggtatcaaagattgctagtccggctgtgacgcttccgcctggtgagttgatgtacaagtagatatctttttcagaatcttgtgcatccaagaataaaagttgggcgatgatcgaattagctaaatcatctgttacttgaccacttaacataatgatgcggtcttttaatagacgagaatagatatcataggctctttcgccacgagatgattgttcaatgactgtaggaattaaattcattttttagtcctcctaaaaatcgatatagatatagtttagcacaaagtttttgcaatatctaaaagtaagtatacccattaggtcaataaaggtcaaataaaaagttcgttatcttttttgcctctcttttaaattatgatacaataaaaagaaagtaagcatgaaagggtcagaagaaaatggcagtagcgattgcaggttttatcggcgtattagtaggcgccttattagtaacgatcatcttcaatctcagaattcgttacgatgaacaaaaagaaaaacggcgacggctgttggagcataaagtcaaagaaatcgagacacttctccaattgaacaggaaaatcagcgaaattttacaaaaacgggtgatcctgatggacgaatatgtcagtttcgatgctttcgatgactgttatataacgatcgatgattttgcttatttacagtcttttgccgcacagaataacttttatttgccgaattattttttagaagaatttttcaagaaaatcggtacccgcagagtgatcctttcaccagaagaaacggtgaagatcggcggttatacgtataaaggcggtcgtgtcatcatggagaatttcttggatacactgactgaaatggtcaatgagcgcaaaacgcaaatgaaaaatttgaccaatgaaccattaacttatttttctaaaccattatagtcgagtcaatcgagaatggggctataacattgagtctgtgacagaagttgcaacgagatgatccgaaggacgtgaacggaattgcgctctccatcgtgtatttgatgaagacctgctgcagagtaggagcaatttcatgattgttgggaggatcattttgtggaaaaacttctgtcatagcctctttttttgtcgattctctgatatatacaaatcctagcgatgcctttagaaaatgaggatggcacaaggagtaggagtttggttctatggggttccgtggtaaaatagaaaaagattggagtgaaacaaatggtacaaatcgttgcccatcgtggcagtagtggagaccgtccagagaacacgttaccagcctttgcagaagcagttcgggtcaaagccgatatcattgaactagatgttcatctatcaaaggatggtcacctgatcgtaatgcatgatgaaacagtcgatcgcagtacgaacggcaaaggccgaatttgtgataaaacgctgacagaactaaaagaattgaatgccggcagctggttctcagaagattatgccgccacaaaagtgccgacgttgaaggaagtcctcgatcttttagcagcaaagaattatcgtggtattttaacgattgaattgaaaacagaccattacgagtatcaagggatcgaaaagaaagtatctgaattgttagccagtcaaagctggccctttactcattggtattgttcattcaatgttgacacattggatcgattgtatgcgattgaaccgcaagcaacctttgactttattatgggaaaatcggaggcgaaacctccgttagcattgtcgcgcccttacattgaagggattcatcctgcctatgagtgggtcaagaaacatgaggaacagatcgcggattatccgattgccattcgtccttggacagtcgatacagaagcagaaattcgtcactgtcttgcagtaggggtcacgggaattattaccaattttcctgagcgagtccgggaagtccaaaggaaggttcaggaggaagctcattgatggaaaaagtgattgtggtagtcggaccgactgcggttggaaaaacggccttaagcatcgaactggcgaaaaagtatcagggagaagtgatcagcggcgactccatgcagatctatcgtggcttagatattgggacagccaaggtaacagctgcagaaatgcaaggaatccctcatcatctgatcgatattcgcgacagccatgaatcctattctgtggcagaatttcaaaaagaagcccgtgagttgatcacggccacccatcaacgaggtcatctgcctatcgtagcagggggaaccggattgtacatccaggctttactctatgactatcaattaggagccgctgaggaaagtgatccttccgttcggcagcgctaccagcaagaagcagcaagaattggcaaagaagcgctatggcaaaagttgcaggtattagatcctttagccgcagcaaagatccattacaacaatgaacgtaaagtgatccgcgcgttggaagtcttggaaacaacgggaataagcattgcagccccgactactgcaccggaagcggtatacgattattttatgattgggctttccacagaccgacagttgttgtatcagcgtattgatcagcgagtcgatcaaatggtggaagcaggtttggttgcggaagcacaacaggtgctgatccatcctgagacccaagcagcaaaaggaatcgggtacaaagaatttgccccttattttgccggtacatgttcattagaagaaacggtcgcacaaatcaaacaacagtctcgcaggtacgccaaacggcaactgacttggttcaagaatcgtctcgctcctagatgggtcgatcttgtccagcatcctgaggacgtatcttcgatcgaaaaagcgatcgaccaatggttggaggagaaggaatgacacaagaacgcgtaatccttgttggcgtagaaacagaacgaaattattcgacctttgcgtcctcaatgaatgaattgaaaagtttgaccaaaacagcaaacggagaggtgattttttcactgatccaaaaacggccgcaagttgatcggcaaacagtgatcggaaaaggaaaattggcggaactgcaacagttagtggatgcccatgaagctgatttggtgattttcaatcatgaattgacaccccgacaaagccagttgattggtgaagaattaggggcgccagttattgatcgtgtccaattgattttagatatctttgctatgcgcgctcgttcaaaagaaggaaaactgcaagtagagctggcacaattagattatttgctgcctcgattgatcggacaagggaaaaatatgtcccgtctggggggcggtattggaacgagaggaccaggagaaaccaaactggagacggatcgacgccatatccgtaatcggatcacgatcattaaacgagagttgaaggaagtcgctgctcatcgtgatcgtacccgtcagaaacgccgcgacagtcaagtctttcagatcggtttgatcgggtataccaatgctgggaaatcaacgattttgaatttattgactagtgcggatacctatgagcaagaccaactgtttgcgacgttagatcctttgacaaagcgttggcggttgccggaaggattggaagtgaccgttaccgatactgtcggctttattcaagaactgccgacacaattgatcgatgcctttcattctacattagaagagagtcaaaatatggatctgctgctgcatgtggttgatgctggttctcatgatcggcaacagcaagaaaaaacagttttagcattgatggaagaactatcattgacgcaagtcccagttctgacgatctataataaagctgatcgcattgatccagaacaatttgtgccgacgctgttccccaatgttttgatttctgccaagagcagtaaagggaaagaacaactgatccaagcaattaaaatggaactcatgcaaatcatgcagccttatcaaaccgttttagctgccaatgaaggcaagcgattgagccgtttgaagcgggaaacactcttgcttaccaatgactttgacgaggaagatcaaacctatcacctaaaaggttttgcattgccaggttctgccgggatctatccaacaattgaagagtaacgctcaggaaatgaagtggtcgagctgtgtgtagggaattctaatacctgcacgcagttttttttcagtgattaccactggaaatttttttcattcgaccagtaaaaggatggttttctagtgattgttctgccaaacagaaaaaaataaatgtctatgtcactttttcttacatgaagggttgacagtggaaaaaacaattggtatagtttcaattaagttatgcaggatcatctaaatgagggaggcgccacgttatgcgggaaaaagagttgcggcgttcgatgtctgtctttccgattggaacagtgatgaaactaacggatctgacggctcgtcaaattcgttactatgaagaacaagaactgatccatccagaacgcagtgatggtaatcgacgcatgtattcattaaatgatatcgatacgctattagaaatcaaagactatctgtcagatggtttgaatatggctgggatcaaacgtgtgtacgagatgaaaattgccaaagaacaagaagcaaagaacaaaccgccactgactgacgaagatgttcgtcgaatcttttatgacgaactcctagcgcaaggtggtctgaatcaacaacagccattccaacaaaaaggtccgctaatgtagatcaatgttgtggcacgaaagaataaaggtcaaaggaagggatattatgccgaaaattgaaagaacagccgaagatatcaaacaaatcgttaaagacgagaatgtacgtttcttgcgcttgatgtttactgacatcttgggaacgatcaaaaatgtagaagtaccagttagccaattggaaaaagtacttgagaacaaaatgatgttcgatggctcctccattgaaggattcgtacggattgaagaaagtgatatgtacctttacccagatttatctacttggatgattttcccatgggaaagtgagcatggcaaagtcgctcgtttgatttgtgatatctacaaccctgatggcacgccatttgctggcgatcctcgcggcaatttaaaacggtcactatcagatatggaatctctaggttttacttctttcaatcttgggcctgaaccggaatttttccttttcaaattagatgaagatggcgaaatcacaacagacctaaatgacaaaggcggctattttgattttgcaccgactgacttaggtgagaactgccgccgcgatatcgtattagaattagaaagccttggttttgaagtagaagcctcccaccacgaagtagcaccaggccagcacgaaatcgactttaaatatgccgatgcggtagaagcgtgcgataacatccaaactttcaaattagttgtcaaaacgattgcccgcaaacacggtttgcatgcgacatttatgccaaaaccattatatggcatcaatgggtcaggtatgcactgcaatatgtccttgttcaatggaaaagaaaatgtcttctttgatgaagaaggaccaatgcagttgagccaaacggcgtatcatttcctagccggtttgattgaacatgcccgtgcttatacagcagtctgcaacccaacagtcaattcttacaaacgtctggtcccaggttacgaagcaccggtttatgttgcttggtcaggacgcaaccgttcaccactgattcgtgttcctgaatctcgcggcttgtccacccggttagaattgcgctccgttgatccatccgctaatccgtatttggcaatggctgtcttgctgcaagccggtttagatggtatccgtcgtgagttgacaccgccgcctgcagtggaccgcaacatttatgtgatgaatgaagaagaacgtgcagaagcacaaatcgaagacctgccatcaacgatccacaatgcgatcaaagaattgcgtaaagatgacgtgatgatcgatgcattgggcaaacacatttttgcgaactttgtggaagccaaacgtttggaatgggccgctttccgtcaaacagtttctgagtgggaacgcgagcagtaccttgaattgtactaatcaattactagtcgttcgatctgcagaggcaacaaacgaataagtcattggaagatggtccttagaatctattgaagcgtctgtgacaaccgatacaaaaaaagaaaccgctagagaaaaccaatctagcggttttgttctgttatctattcaaagtagaagacaggaatcgaacctgcaccttgttttcgcaaaaatgataagaaaacgatttctgatcatttgtaacaaaacaagtaaagcaccgagcttcctctacaagaatcattatgacaagcagacccaaagaatccattaagaaagtaagaaagaagtttagcgattgaatgttcatcgaaatcagcgatttttcgatgtatccgcatccagaaaggattcgagaaaagtttgcttgacttttgctaggcaagattgtatcattctgtttgggcactcttgaaaaagagtcagaaagtgatttagaattttcgctccctattcatttatggatagggagcttttcttattttctaagtacttttcctgcaaaatagtttaaaaggagtttttcagtttatgacaaaatatatttttgtaaccggcggtgtggtttcttcgatcggtaaaggtattgtggcagcatcactaggacgcttattgaagaatcgtggcttaaaagtaacgatccaaaagtttgatccttacatcaatgttgatccaggaacgatgagcccataccaacatggtgaggtattcgtgaccgatgatggtgcagaaacagatttggacttaggccattatgaacgtttcatcgacatcaacttgaacaaatactcaaatgtaacgactggaaaaatctattcagaagttttgcgcaaagaacgtaaaggggaatacttaggagcaactgtccaagtaattccgcacatcaccaatgaaatcaaagaaaaaatcatgcgggcggcaaaaatgaccgattcagatgtcatcatcactgaagtcggcggaaccgttggcgacatcgagtcgttgccgtttctagaagcgttgcgccaaatgaaagctgacgttggttcggacaatgtgatgtacattcatacaacgttgattccttacttaaaggcagcgggtgaaatgaaaaccaaaccaacgcaacacagtgtaaaagagttgcgaggattgggtatccaaccaaatatcctagtggttcggactgaacaacctgtgtcccaatcaacaaaaaacaaattggcccaattttgtgatgttgcacctgaagcggttatcgaatcccgagatgtagaaacactctattcgatcccattggctttacaagcacaaggaatggatcaaatcgtttgtgatcacttgaaattgaatgcgccagtagctgatatgacagaatggcaagcattagaggaaaaagtattgaacttgaaaaagaaagtccgcattgcattggtagggaaatatgtggaattgccagatgcgtatctgtctgttgttgaagcattgaaacattctggttttgcttatgatgccgacattacgatcgattggatcaaagcccatgaattaacgaaagacaatgttgccgaatacttacaggatgcagacggtatcttagttcccggcggttttggcgatcgtggaatcgaaggcaagatcgaagcgattcggtatgctcgtgaaaatgatgtcccattcctagggatttgtctgggaatgcaaatggcctgcgtggaatttgcccgcaatgtcgttgggttagaaaatgcgaattcggcagaaactgatcccgatacagcaaacaacatcattgatttgatggcagatcaagaaaatattgaaaacttaggcggtacgctacgtttaggcttgtatccatgtaaagtcaaaaaaggaacgaaaacagctgcagcctatgaaggagaagaagtcgtacaagaacgtcatcgtcaccgttatgaattcaataataaataccgcgaaatctttgaagcagaaggtatggtcttctcaggtgtctcaccagacaatcgcttagttgaaatcgttgagattccagaaaataaattctttgtgggttgccaattccatcccgaattgatttcacgaccaacacgtccacaacgattgatcaaagcatttgttggtgcatcattagacaatcgtgggtaacacatatagtaccagattaaaaaccagctgttgagctggtttcaggttgtaggcaatgtcccggaaaagggaggcctacagcctttttttaagcataagagtacgctctaaataaatgtgggggaaatatagtcaggatcactcgacccatttataaaggaacgttctcataaaacacccttcaaaagttagtttttttggttaacttttgaagggtgtttccgttctagccagtgctagtgctttttttagtagcatccgaagtgatacgccttttcagctactcctaactattaaagataaaacttcttgtagaaattgaccctaataaaagggaccatatacctatggaggttgactacaatagactctaaactaattaatgagggagagaaagatggaaaaaataagcttattgttgatcagggctctttcagagcaagacgggtttatgacaaccaaagagatcgctgcaaaagtaggtgtcagtacgaaaacagttcgtagatatgtggagaaaatcaatcaaagccaatcgctttatggctgtgtgattcaagggaagaaaggaagtggcttgtttttacaaataatcaatcatgaattatttcaacgtagcttagaaaacacacctcaagaagattttgtgacacaaatcattgagtacttcgtccaagaagacgaatacatcaagtcagaattattatgtgaacgcttatttatctcacaaagcaagttatctcaagaactcaaaaaactgcgacggattttaagccattataatttatccatccaaacaaagccttactacggcatgaagctttgcggcagtgaattcgacttacgtcgctttatggcaagcaattatctgcaaaagacacaccttaaacaactgcatcaattaccttctagtgaagggacgccatcgcagttgcatcgacagattcaagcaatcattttagctgagttttctcaaaaagcctatccgatttcagaagctatagtgacgaacttagtcaatcacctagcaatcgctgtaatgcgaatgcaaagcggccgctacttggatcgcaatctgcctattggaggaagaaccaatgctgaacaatcattattaggcaagcgaatcgtcaagcggatcgaagaagaatgcggtgttctttttacagaatgtgagcgaaattatgtgcttggtcagatcgtggggaaacgggtcattcccaaaaatgaaaaaaacgttgtctcagaggaagtttcggacttagtgaggcaagttctaaaaaaaatcaaaaaccgaagacaaattgacttcagtcaagatttggacttacagacgatgctgatgcttcactttgttcctttgattgatcgaatcgaattaggaattgagctgaaaaacccgctgttagatgacgtaaaagtccattgcaatgtaggatacgacttagctattattgctggtcaagtaatcgttgcgcatttcaataagcgtatcagcgatcatgaacttagctatttagccatgcactttgatgtcgccctgaataagaagagttcacaaacgcagcgtaagtatattttagttgtaaacgatctggggagagcagccaatgcatttttaaaagaaaagtttgaattctatttccgaaattacattaaagaagtaacggtttgtaatcaatatgaatttgctcagttcctaaaagaacaagactttgattttatcttttcatcaatcgatctaccttatgaaggaaccattcctgtaatgagttttgactattttatgcggcctgaaatgatcaaaaaaatagctgatgcactgtcgactgtttttaccgttgaaaaacttttgaccttctttaaggaaccgctgtttatttgtgaccaagactttgaaacaaaagaagaagtgctgcattttttatgtcattgcattaacgaacaatatcagatgccaaataattttgaagctttggtatttgaacgagaagctttttttggaaccgatttcttgccgatggttgcttttccacaccccaatgtattgattggatcggaaacagtgattgctgttgcccatttgaagaaaccaatattttggtataaacaatcggttcgtttggtcttcttactagtcattgctgagcaagaccatttaaaggctaagtcgctaaacgatcatttgatcaaaatatgtacatcatctgagaaagtgaacgaactgattgcgacgaatgacttcatcacatttatccatcacttaaaggagtagattatgacagacaaaaaaatcaaactatcaggagcatacaattttcgcgattttggcggctaccgtaacaaagaaggaaagcgtctcatacgtgggcgactctatcgttctgatgaattaagcaagattacagctgcagatcaagaaaagttagtacaacttggaatcagtaagatcattgattatcgaaataaaaaggaaagactgaataatgaagatcggccgatcggtaatgcagagattctttatttgacacccattgcggatattgctgccctagcttcttctgaacatgatgaagaaagtgcactttctccccaaaaaatgacggcggctctggcaaaagaattaatgatccgtcagaatgaagaatttgttgaaaataaacagtgtcaagacgtttatagagaagtcttagaaattcacttagctgaagagggggcaatcgtccaacattgccgtggagggaaagatcgcactggttatggcgtcgctctcattcaattactacttggcgtcagtgaagcagatgtgatgcatgactatctcttaaccaatgtatacaaaaaagaaaaaaatgagaaaagcctgcagctgttgcttcaagagaccgataatcccgattttgttcaggcgatgcgctattttaaagaagctgatcgtcattttttgcagaatgcattggcgcgaatcggagcttatggtggagttgagggctatgtggtcaacaaacttggtttttcccaacaaaaaatccgcttgttaagagaaaaatacttacaaaattaaggataggaggatattatgaatacgtttaagaataaggtgttggcgggagcaattaaggtgcaaaataatgtttatatgaaagcgatctctaatgccatgatggggttaatgccgattatgatgatcagttcgattgcttctttaatcaatgccatcgatattggcaatacacaacaaataatggatcaaataggtcttaaatcattgttgacacaaatcaatgcgatgaccatcgatgtcatttccgtctatgttgccttcttagttggctataaactggcggaacatttgaatgcagatcaattaaacgctggcattatgagtttagtttcattcttgattttaagtcccatcgcaacattcgaagagaccaaagtgatcgagttttcgacgctgggttctagtggaatgttcgttgcaatgttcggcgggatactaggtgcaaggatttatattctatgtgtggaaaagaatctgacaatcaaaatgccagactcagtcccaccaattgtcaataagtcctttgctgcaatcgttcctggagtgattgtttccacgatcatggggattatttatgttgtaatagcagctactccatatggaacgttaacagatatgatctacacgtgggttcaagcaccgctaaccttattgggtgccaatgtgtttgcttgcatgattattgtggcatttattgaattcctatggtttttcggtatccatggtgtattagctgtctatccagtgttgatgctggtcttttatcaacctatgctagacaacttggctgcctatagtgctggccaaccattgccacatttgtttaccattggttttatactcaacaatcgcggcgctcgttcctttgcagtagctttattagccattttcagttgcaaatcagaacagctcaaagctgttgggaaaattggattgattccttctatgtttggaatctcagagccaatcaaatttgggattccgcaggtgatgaacataaggatgttgataccacttatggtaacaccagctgtttctgttttatcagcttatttattaacgattgttggctttatgccttatcataatggcgtcaatatcccaacaggatttccaatcatttttggcggtttcttaacgaatggctggcaagggattatcgctcagctgatccaatttgtgttatgcgtgctgatttatattcctttcatgcgctggcaagataaagcagcactggcagaagaaggaaaaattgcgcaagcataacaagtactgacagcctataaattaaaattaagtgggggatttaagatgaaaaagatcgttttagtttgtgctggtggaatgtctactggtgtcttagtaaataatatgaaacaagcagctcaaaaaaaagctattccagtattgattgacgcattttcaatcgaatcggtagctagtgtggctaaagatgcagattgtgtgttattaggtccacaggtttcttatcgtttagcagaagttcaagggttagtggcttgcccaacagcttctattgatatgcgaacttacggtatgatggacggacaaaaagcactagaacaagcgctggaattgataggagagtaagatggaagaaaaagaacaaatttgttttcaaattatttccgaagctgggatggcaagaagttgctttttcgaaagtattcaacaaatgcgaaaagagcaaacaaaagaggccctatctgcgattgaaagtggcaagagtcattatcacaaagcgcatattgctcatcggcaattggtacagcaagaagcacaaggtgataaagtttggatgtcgttgttattgagtcacgccgaggacttgttaatgagtgcagatattatgagtgagttggccaaagagttcaatttactttatgaagaagtaaatgggctaaagcagatgattgatcagcatatttcttcattgaacacaaaagaataacaatcaaagaagaaagacgtctacgatgagacgattcgagtgaaatcgtggacgtcttttcttggtctatggcaggtggaacatttttctaggaaaaaagataaaaaaagctggtctcaaaacggagcaggcaagaaaagtggattaccaaagcaaatggcactatctctttgagaggatgggatgcatggactcgttcaaagaagtaaaaaagcaaaagaaacatacgaagaacagctcccccatttcttccgttaagaagaaacgggggaaagctggttttcattaaaaaagcccctttttcaggggccagtagggatgatctttctaggaccattccacattcgctcttttctcaaaggaatagtttattttttcaaggtatacccttggtctagtaacattttttccgttcgttccatgctgatgccatttgaagtatcaccttcaaatgtgacccctggcaattgctttgccgcatcgtagtctaaattactgtaatcgatcgtcaatgattcggttgctgcatcttctccgtaatcaagcgaataatcgatacccttgattgcctgatactgtttggcgatcggatccaataattgttttgcttcctctttcgtagatacgccaacagaagaataaggcatgatattgttggcggtttgctttttcacttcgtcaccttcgtaattgaagaccaactccatttgaactccgttttgttcattcgtgaatgtcttggttttttgactcgctccatttgctccgcaacttgctaaaaagaatatacccaacaacgctataaatcccactactgtttttttcattctatccctcctttttttcatgatagtatactccacctgccagagctattcatatgctcaaaaacaaatagtctttctttgtccgataggcaatccatatcgtcagcgggaaaatgataaattgttgaaaaagttcgtgaattttttctcgaattttcagaagtattcttgttattgtatgcaaacaaatgtaagacgagaggctagtttcacaaagttttttcagaaaagaaaatgaaaagcaaagaatttttaatttgtgcaatcttttattgaaaagagaattacatcttttagtagcaaatactgcaaatgtttgctaaaatagcagtgtcggttaagcattgcttaacaaataaagttttttaaaacttaggaggaattttttatgccagtagtatcaggagctgaattcttaaaagctgctcgtcaaggcggatatgcagtaggtggattcaatacaaataacttagaatggactcaagcgattttagaagctgctgaagcgaaaaaagcgccagttcttattcaaacttctatgggtgctgcaaaatacatgggcggatacaaacttgctaaagatcttatctgtgatctagttgaatcaatgaacatcactgttccagttgcgattcacttagaccatggtgactacgatgcagcaatggaatgtatcgaagttggctatacttcagttatgttcgatggttctcatttaccattcgaagaaaacttgaaattggctaaagaagttgttgaaaaagcacatgctaaaggcgtttctgttgaatgtgaagttggttcaatcggtggtgaagaagatggcatcatcggagctggtgaattagcagacatcgaagaatgtaaacaaatggttgcaactggtattgattacctagcttgcggaattggtaacattcatggacaatacccagaaaactggcaaggacttgcttttgaccacttacaagcaatcgctgatgctgtaggttctgatgttcctttagtattacacggtggttctggtattcctcaagaacaaatcgaaaaagcaatttcaatgggtgtttctaaagtaaacgtaaatactgaattccaattgtcattcgcaaaagcaacacgtgaatatatcgaagctggtaaagaccaagaaggtaaaggttttgaccctcgtaaactattggcaccaggtaaagctgcaatcatcaaagatgcagaagaacacattgactggttcggttcagctggtaaagcttaattctttcagttcaaaagaacgatcacaagtgatcgttctttttttgtggggaaatcctgcttttttctttgtctgttctatgctaaaattggcatgatacacacaaactctaaagtataggtggatatagatgaaaaaaattgtcattcaaggcaatcgtcccttaaaaggagaagtgacgatcagcggggcaaaaaatagtgcagtagcgttgattcctgcggcgattttggctgattctcctgtcgtattagaaggggtgccggatattcaagacgtgcactcattgattgaaattttagaaattatgggtgttcaaacgcactttgaagaaaacacactgacgatcgatccaaccgagatcgtttcgattccgatgccaagcggcaaaatcaatagtttacgcgcttcttattatttcatgggcgcattgttaggcaagttcggtgaaggagtcgtgggcttacctggcggctgtttcctaggtcctcgtccgatcgatctgcatatcaagggattcgaggcgttaggggctacggttacgaatgagcatggcgcgatgtatttgcgtacaagtgaagcggggcttgccggagaacggattttcttggatatggtatctatcggagcgacgatcaatgtcatgttggcagctgtcaaagctaaaggcaagacgatcatcgaaaatgccgctcgcgaacctgagatcattgatgtggcaactttgctgaacaacatgggagccaagatccgtggggcaggcaccaacgagatccgcattgaaggcgtccaagaattacacggttgccgccattcgatcgttcccgatcggattgaagcaggcacttatctttctttggcggcagcagccggtgaaggaatcaccatcaaaaatgtcatttatgagcatcttgaaagctacatcgctaaattagaagaaattggtgtgcgcatggatatcagtgaagatgaaatctatgtttatccatcgaaagatttaaagccagccaatgtaaaaacatacccataccctggttttgctaccgacttgcaacaaccgatcactcccttacttttgaaagcaaatggcacgtcagaaattttggatacaatctatgcaaaacgtgtcaatcacataccagaacttgcacggatgggtgcgcaagcaacaacggaaggcaatttgatcttgctcaacggaccgagccagcttcatggcgcagaagtcgttgcatcagacttgcgagcaggagcttgtttagtaattgctggactgatggctacgggaaccaccacagtcttcaatgtcgaatatattttacggggatatgatcatataatcgataaacttacagccttaggggctgacattcaaatggtagaggagtaactatgagcgactatctaacaatggcagaactggagaacaaaacgctaaaagaaatctacacgtttgccaaagaatttcgaattccttattacagccaaatgaacaaaaaagaattatcactggctgttattcgggcccaagcagaaaaacagggtttcttttatatggaaggtatccttgatatcgttggacaggaaggttatggctttttgcgtccaatcaattatggccccagtgcagaagatatctatatttcttcttctcagattcgccgcttcagtttgcgaaatggcgacaaagtagcggggaaagcgagaccgccaaaagagtcagaacgttattatggtttgatgcatgtagaatctgtgaatggcaaagatccggaagaagcaaaagaacgaccgcacttccctgcattgacgccgctttatccgaatcgtcatttgaaattggaaactacccctggtcgtctgtcaacacggatgatcgacatgctggcgccggttggctttggtcaacggggattgatcgttgccccgccgaaagccgggaagactagtatattaaaagaaatcgctaacgggatcactgacaatcacccggatgtagagttgatcgtcttattgattgatgaacgcccggaagaagtgacggatttggaacgaagtgtcaaaggagatgttgtttcttcgacctttgatctgcagcctagcaaccatactcgggtctctgaattggttttggagcgtgccatgcgtttagttgaagacaagcgtgatgttgtgatactgatggatagtatcacgcgtttagcgcgtgcctataacttagtcgtgccaccaagcggccgtacattgagtggcgggatcgatccagccgcattatacaaaccgaagaaatttttcggagctgctcggaatatcgaagaaggtggcagtctgacgattttagccactgcgttagttgataccggcagccgaatggatgatgttatctacgaagagttcaaaggaaccggaaacatggaactgcagctctctcgcagtttagccgagcgtcgtattttcccagccatcgatatcaagaaatccggtaccagaaaagaagagctcttgatgagcagcgaacaattagaagagacttggcgcttgcgcaataatatgactggtgactcattagaattcacggaacaattcctacagtttttaagaaaaacaaaaaccaatgcggatttcttgtctgcttttcatgacgtacattttggcgataaacggccaaaaagaaatctaaaaagataattgcatcgaaaaacgaaacatggtaagatagtcatgttgtaaaatcgacaaatcaactctggtacagcaaatggaccagggcaaaggagagaagaagaaatgaaacaagatatccatccagattatcatccagttgtattcatggactcaactactggtttcaaattcttatcaggttcaacaaagaattcacaagaaactgttgagtgggaagatggcaacacgtatccattgatccgtgtcgaagtaacatctgattcacatccattctacactggacgtcaaaaattcacacaagcagatggacgtgtggaccgtttcaacaaaaaatacggtctcaaagacgcgaacgctgcggaataattctaacaaggttagaacgttggtttatcaacgatttagagatgttttccttcactggagacatctcttttttgaagatgaatgccaattgaaaaaatgatcaaatggtacatttctatcgaaaatgatagtcgcatatattgtttatagagttaaatgagaccaatcaagctgtagcttcttgccgagttttgaaacctcgatgagttgtctttttttttattttccagtcactggatcagttctcaaataagtttgaaatatataggcggttgagccatttttattcgtgtatttttgtcataataacatccataaggataaagcaataatcgatactttagtctgaatattctgaacaaatcttgtagtctgttagatgttgttattggatgaaagtaagttcaaatgaaaatagtcgattcaccaaatatttttctattaaaagagatgatcatcgcaattaactattctgatctgaaaaaataaaaaggcaactcaagagttaccttttgttgatgtaatctgtttacttcttcttgtcaacttcgtaagtagcgaaagcgagaataaaaaaaagactgctaaggatacaccaaaccatttgaatactttacggcctcattaaaagaaatcgctcttttagtaaggattatgggcggatcaaagttattacatgtgtacaaaaaataaagaaaagaccatttttgcaataaaggaaccagcaaaaaaagcgagaacaatcaacataattttccaaggttttaaccaagcactattctttttcatctaatcacctctataaaaagaatactatgataaataaataatatcaaaaaaaattgatacttaatcagttattcaccaaatcaggcaactaacgagatgaaatcagaatcagttttgcttttcagattttttaagtttaattgctcgtattaggtggacacaaaagcttgcaaaaaataaaagccctgcaatttttggaatggcaccaattgaagctaaaaataaaaaagctgctataaagtttacacaagcggctagcaggtaaaggtagaaactagtttttcttttcaaagtgctcactcctttcgaacagcatatcatactttattttcaatgtgaaaaaataatgccaaagaaagtcgaaataaataatttcactatccgacgaaataaaaaagaaatagaaagaacttctatttcttcgagcgatttttattcgaatacagggcaatgattatagctacggctatgcaaaagattaatacttttaacatattcacacatcctttttagattagtttaaattataactttctaaaaatatatagggctttaggcctattagtaaaagataattcagtcccacaagttatcgaactcttttttcgagttttcttacaattggatggttctatttttttcaaacaactgttaaaacaaaaaagtgaagaaactactggaattaaaagtttcttcactactcatcaagtaatcaataaacctttgtttattcaaatatgtaacatctaaattttttgaagcaaggaaaaacaaacatacagaacaatagaaagagttgaaaaagtaagataatcgttaaattgacagttccgtaacgctggtaaaggtagatatgtacgagtaattcaccaagattcatgagaatcaagataagataactactcgcttttacttggcatctttttagtagatgatagctgatgtaataatcgcgtaggacacaaaaaagtaatgatagtttgtttaaagccgtgatggtatcatgttgttcggcaagctgttgaaagaacaaaagtgctgtgggaaaagggatataaatgattaataaagaaaaaaatatacaacaaaaggcatattcacactcctaaaaaaaattaccaaaaggcagaaaataatttagcaaatttttattcagaggtcaacagtaggatttgttatttcaatggttcgagcattaggcatgattgtttttgtttaagaaatgaaatcttggtttacagactgaggaaaattgcggtgattttctgtcacggaggaatgcaccttgataaaccccgtcacaataaggttataagagggattgaatattattattaaaacaatgtataaataaaaaaactcctgaaagcagagtggagaagacagttactcttgagttcagaagtttttggtttttgaaaaaaatcaattttatcaatgaaaattgttatttttgtgcatttaatttttttaatacatcagctggcacatctttttcagcgacctcattcggtccggagatgatacgtttttgactgatctctgctttaactagtgtgttaggagcataaggctggatatcttcaccagacaattcataggtcatttcttgtctttcgccattttctttaacaaattcaaacgtatatttataagaagaatagccttcgattttttttcctgaaccgtctactgtttgtttcctttcaggtgtttcttttggtgtgcgtgcatagacagtgactccttgataggtctcagaatagtatttataactaaaatagcctcctacaccaagtgcgactacaagaagagcaagcatcatttttttcataattaaccctcatttcttttttgctgagacgactataacacggactagcttaaaaaattcattgaaaaagataacactattgtaagcttttgattatttacatgaaaatatagctgtaattttctgtcgaggaattgtgatagaagaaaatagaattgaaatcattttgcaatattgtaatgttaatcttttatttgtgcctggggagaggtacaaatacacaaaaagagaggttttttcatttgaaaaaatttgtattcacagctgttgcaggactaggtttatttatcggaggcactgttgcatctgcagaggaacaaacccatgtggttgctccaggagacacactgtcaggattagcaactgaatatggtacgacagtggatgaccttttagcattgaatgaatccattcaagaccctaatttgatttttgatggcgaaacattgctgatttttagtgatgcacaaccgatgacacgcgcgcaagaaacgacagaaacagcgcaagcgcaaactgaaactgcgccggcagctacacaatcaaacgctgctagcactagcgctgcaagtacaccaagtactggttcaggagtcttgaatccagtggacggtatcaattactataatggtgtcagagaatcttattattcacaaaaagtattagctggtggcggcttaaatattcctggccgacatgttgccgctgacggaacgatccgtgatgcagatggttatatcgttgtagctagtgacaatcaagccaaaggctcaacagggcaatcttctttgggtgcctacaaagtctatgatacaggcgttggtcacagcggaatcgacgtttacacaaactggtaatcagcaaaaacagctgcatgaaatatgcagctgtttttttgttatggtctagactaattcttgtcaaaaaaatgagagtgtggtatcattggactataccaaaatgaaatgaggagcgtatcatggaaattattcgcgtgaaagatgcagctgaaggtggaaaaaaggcatttgaattgattcagcaaggcgttgaaaacggcgctaaagttcttggattggcgacaggcagtacgccagaaacattgtatgcagagatgacagctagcgatgtcgatttttcaaacatgacttctgttaatttagatgaatatgtcggacttggcggcgaagatgatcaaagttatcgccactttatgaatgctcatttatttgacaaaaaaccattcaaggaaacctttgtaccgaatggaaaagccgaagatttgcaagcggaatgcaaacgatacgatgaagtgatcgcggaacatccagttgacatccaaatcttaggaattggtcagaacggtcacattggcttcaatgaacctggggcatcttttgatggcacaacatcagtcgttgatttgactgaatcaacgatcaatgccaacaaacgctattttgacaaggtagaagatgtacccactactgcaatctcaatgggcatcggttcaattttgaaaggtaaaaaaattattttgatggcctttggaccagctaaagcggacgcaatccaagggatgattgaaggtccggtaacgacggatctgcctgcatctgctttgcaaaatcatccagatgtcacagtcatcgtggatgaagcagcggcagccaatctctaacatcaattagttggcagagcgtccaatctaatcgacaaaatccgaatgaacatcggaaaaaccagctacttccccatttcatccagtcggatgaaaagttggtattttcgatgattcttcggtttttttatttttcatggaatacagcttaaagatgggttgcggaatttggaccttccttttttcatttttaaaaatagatggtatagttgaaaaggggtgtttcaatggttgatatggtcttatcgattccagaaattattcttagactcgttttagcaatggtcatgggaggcgctatcggttttgagcgacagtacaaaagtcggccagcgggattacggacccatattttagtctgtatgggggcatgtgtcattgcactgatccaagtagagatcgctagtggggcgatgcgtgatgcgttgaatcatccagatctcgcaggggtcattcgttcagatgaagctcgattgatcgcacaagtggtaagtggggttggttttttgggtgccgggacgattatcgtgacaaaacgctcggtaactggattgacgacagctgcttcattatgggcgattgctggcttagggattgcgatcggcatgggattttatgcgatttcgattactagttttgccgggatcttttttgcactgacggtgatcaagcgaattgtgcgagtcccgacagccaaaaaattggagattcaatacattcatcgtgcggaaacaaaggaatttttgacagagtattttcttgatcgaaaaatcgtgatcgaagatgtcaactttgatgtgaagttcatggaagactatcggatctataccaatatttatacgatcaacttaccgtgggggctgagtttctctgatgttatcgaagaattatcagtttataaaaatatcactaagctgcggttggttgatgttagttaaaaaagtactgccaaaggtcacacctttggcagtacttttttagttaggaaagaaacatgcgatcccgacaatcgctagattgctaagaaagttgactgcttcatttgtgatcaaagcatagccatgcacttttttcgttggctgctggtgatggcttttttgttcggtaaattgatgacaaaccgtgcattggtaacgtacttgaatcgttgctcccaataaactatcgattatactaccgctaaatcctaacaagagtacccaaatcaatgctgtcaaagagagcggttggccgctgagccagagacagatcgccagaagtaaaacgataccgccgctgcccgcaaaagaagcaatggtacctaggaggctgacaccgccagaaagacccgcaggtaatttttttcccgttaagagatttcggggtgcctttttgctcaaaataccgatctctgatccccaagtgtcggcggtacagctagcgatcccgacaataaatgcccagagatagttctcattgttgaaagaggcgtaaccgatcaatgccaataaactaggcgataaattagccagcacttggatggcttcgcggcgcgcacctttgatcaccagatcatcggctgagttttttttctttaagtgattgatgattccagagctggcaaaaaagaaaccaactaaaaagatactgaaccaaggtcccaaagcaatgatgatcgtcccacttaaggcagctgctaaagcaccggataaagacaaccactgcaaaataaaagcggatcctgctacaaatgcactacagatcagtcccagtaaaaattgatagaaaaagaccacagcttccacctcgcttttttcatcagtttagcataaagcaaactcgtatgtagctttttttcgttactgacagcattttgctcgtcaaatgagagcgtttcatttaagcttagactaagaggtgagtgtatgaaaatcgtgatcatcggcggttcattcggagggatcagctgcgccatcgaagcacgcaaaatctatccagaatctgaaatcgtattgattgaaaaaaaagcccatatcgggtttattcccagcgggatgctcctgtatttagaaggcaagattccttcgttgcaagacgcattcttttgctccaaggaacagcttgagcagttggacattcaagtagcattgcaagaaacaatgttgaaacttgatcctaagaaccatttcgttcaaacagatcagcgcagaatcgcttatgatcggttgatcttagcagcaggatctgcacaagaatcagaaattctcttaccgatgaatgaagccgcattgacctataaagattacggcgctgccaagcaatttattcaggaattagatcaggcagaaacgattacgatcgttggggctggacaagcaggtatggaagcagccaacacattaacgacgctaggaaaacaagtccaactagtggaatcaatgacgtatcctttattcaaatattttgatcaatcgtttctggctccttttttagatgaattagcacaaataaaaaatctgcagctttatctggcagaacctaccattgccattgaatccacggaaacaggcttccgagtggagaccgccaatcggacattgctcagcgcgcttgcattgacgaccgtcaatgtccgaccgcggccgcacccagcatttcagcagctgcgcttgcacagtgatcatacgatttggacggatgcttatttggaaacttccgaaaagggtatttttgctgtcggtgacttgattcagatctacagtccaattacacgggatacggcttatatgccattagtaaacaatgcagttcgttccggaatcgctgctgcgcataatttgcaagagaaaaaagaaccttttcgcggcggcttacggacagtgggaacccatctgtttggctggtatctggctagtacaggaatgactgaatcagatcgcttcttttatgaacaagaaattaccgtcaaaaaatttaccgctaaagcttcattagtagatgacacaccgatccacgggaaactgatcattgccaagacaagcgggcaagtattgggcgctcagttactgtcaaagtacaatctcttagaaaaaatcaacctgctggcatttgccattgaaaaggagagcacattgtcagagttagcgcaaaaagatttcttttttcatcctcattttactgatgtctttgaactgtccaatgcgattgctttaggaagtgctgccaatgaaatttgaacaattattagaaaaaaaagaagccaagcaattacagctactgaaaaagctgcttctagttggaggtgaactagagcttcatgagatggctgcttaccttaggatcagcaaaccatccttagaaaaatatgttgatgagttatttctatatttagctccttattctgatcaatgccatcttttttatcaaggttcatcattagttctagaaacgagcccagagttctcgttgaatcagattgaatatgtgttctaccactcgtcgatcaaatttcaagtgctggaacatgtattgatcaatcaagaaatcgccacgattccgttagcgcaaaaattaatgattagtgaatcctccctgtttcgcaaaatcaaagaattgaatcaagtgttggcagaattcggattagagatttggcaggggaaactcatgggggaagaagctcagattcgctatttttattttcagctgctttggtacttaaattctttcaagagtcagccattaccgattgatacaaaatttgtgggactgatcgctcgtgggctcaatctgacctttaccgaggaagcacagcaacgggtcagtttgtggctgaagatcatgaagtatcgtttaaaagcgcccggacaatcgtttcaaagactacgggaaaacatggcattttatgagaaagatccattgtatcagcaactgcgggaacttgtctttcgcagttttgggcattatgcactggaagttcgtgaagaagaggcgatgctccattttgttttcttgctttccttttccgttttctctgaacaagattttcgccagtacatgctgcaacgctcccgatttacgccgacagcacttaccgatacgctgatcttggaacatatcctgcatttgtatcgaccggctgtcccgcaagaaatcgaagccaattgttattttcatctttctcagatccatagtcgtttgtattttttcaaaggagatgtcgaagtttttgatcgagaaaatatttggcaattagaagcaaaactctcaagtcgtaatattcgccagatcagtgaacgtttattgaatactgctgtacaagaaatgaagctggaagcatcagaagaaaatacattgtatatgatgaccatggtcaaatatttgagtgtcctgacgatcattgattaccaaatcaatcgggaatttcgggtaggcatcgcgttgaatatggatgcacttttcaaagaggcagtcttttatatgtggctgctgtacttaaaaaatttgaatggggtcgtcgttgagcgctatgctaaagaacaagactatgatctgatcttgacgaattatccgattgaaacatcgattcctacatatcggatcagtgagttagggacgacttacgatcgagaaaaaatcaaaaagatgattcgcgaacgcttcaactaatggcgtttttccagatttcgtcaatttcttagaaaatctctaaaaagttgacgagatcactacaggtaattcgagtaagataaatgtaagaaaacggtatcaaaagaataaatcaaccatttaaaaggagagagaaacatggcagagaaaaactatattatggcaatcgatcaaggaactacaagctcaagagcaattatttttgaccgcaacggacaaaatgtcggtagttcgcaaaaggaatttccccaatattttccaaaatctggttgggtagaacacaatgccaatgaaatctggaactctgttcaatcagttatcgcgggagcctttatcgaatctgggattcgacctgaagcaatcgccggaatcgggattaccaaccaacgggaaacaacagttgtttgggataaaaataccggtcaaccgatcgccaatgcgatcgtttggcaatcgcgccaatcttctccgattgctgaccaattgaaagccgacggacatacagacatgatccatgaaaagacagggttagtgatcgatgcttacttctctgctacgaaaatccgctggctgcttgataatgtggaaggtgcacaagaaaaagcagagaatggggatctactattcggtaccattgattcgtggcttgtctggaaactgacagatgggcaagtccatgtgacggattactccaatgcgagtcggaccatgctttataacatccatcgtttagaatgggatcaagaaattttggatttgttaaatattccagcatccatgttgccggaagtcaaaagtaactccgaagtttacggccatactcgcagctatcatttttatggcagtgaagtaccgattgctgggatggcaggggaccaacaggctgctctctttgggcaaatggcttttgaaaaaggcatgatcaaaaatacgtacggtacaggggcgtttatcgttatgaataccggagaggaaccacaattatccgacaatgatctgttgaccacgatcggctatggaatcaatggtaaagtatactacgcattggaaggtagtatttttgttgccggctcagcgatccaatggttgcgggatggcttacgtatgatcgagacgtctccgcaatctgaagaattagcggcaaaagcgactggcgacaatgaagtctatgtcgtaccagcctttacgggattaggtgcaccttattgggattctgatgctcggggagcagtttttggcttgacccgcgggacaacgaaagaagacttcgtgcgggcgaccttgcaggctgtcgcttatcaatcgaaggatgtcatcgataccatgaaaaaagattcagggatcgatatcccattgttgaaagtggatggcggggctgctaaaaatgatcttttgatgcaattccaagcagatatcttagatattgaagtacaacgggcagccaatcttgaaacgacagcactgggggcggcttatttagctggcttggccgtcggcttctggaaagacctcgacgaattgaaagcaatggcagaagatggtcaactctttacaccagaaatgccagctgatgaacgtgagaacctttatgaaggatggaaacaagcagtggcagcgactcagatgtttaaattcaaagtgaagaaagaaggcgagtaagccatgactttttcttataaagatcggcaacacgccctagcagaagcaaaaaatacgacctatgatgtattgatcattggtggcggaatcactggtgctggagtcgccgtgcaaacggcagctgccggcatgaaaacgattttggtagaaatgcaggattttgctgaaggaacctcctctcgttcgacgaaactggttcatgggggcatccgctatttgaaaacatttgatgtcgaagttgtggcagatacagtgagggaacgagcgatcgtgcaacagatcgctccccatattcctaaaccagatcccatgcttttacctatctacgatgagcccggtgcaaccttcaatcttttttctgtcaagattgccatggatttgtatgatcgtctggcaaatgtaacagatagtaaatatgccaattatacgttgacgaaagaagaagtattggaacgagaaccgcaactgcaacatgagaacttgaccggaggcggagtctatctggatttccgcaacaacgatgcccgtttagtgatcgaaaatatcaaacgggcccatcaagatggtgctgcaatgatcagcaaagccaaagttgtcggtatgcttcatgatgaacaaggaaaaatcaatggtgttcaagtagaagatcaattaacgaaagaacaattcgccatccatgcgaaagttgtgatcaataccactggaccatggtctgatatcgttcgagaattagatagcaatgataacttaccgccgcaaatgcgcccaaccaaaggtgtccatttagtggtggatcgtgaaaagctgaaagtacctcagccaacttattttgatactggcaagaatgatggtcggatggtttttgtggttcctagggagaacaagacgtattttggtacgacagatacggattacacgggcgatttttcccatccgactgttacgcaagaagacgtcgattatcttttagagatcatcaaccatcgctttccagaagctgcgatccaactggatgatattgaagctagctgggcggggttacgcccgctgatcacggctaatggcggttctgattacaacggcggagctaagagcaaactttcggatgaaagctttgatcaaatcgtgcaaactgtagaagcgtatttggacgatcaccgcaaacgcccgcaagtcgaaagggcgatcaaacaagcagaggaacgtctagaagccagcagtgtggatccttcacaagtttctcggggcagcagcttggaaatgtctcaagacggactgttgacactggccgggggcaagattacagattatcggttaatggctgaaggcgccgtcaaacgaatcaatgaattactggctgcaaaagggcagcagtttgaattagtggattccacgcgttatccggtgtctggcggcgaaattgatccgaccaatgtcgaggacgaactggcgcaattggcgaaaaccgccgaagctgccggtttttcccctgaagatgcgcgatacttggccgatctttacggttcaaacttaccgatagtccttacctataaaaccacgtttgcggggctggacgaaaaagaaagcacggcattgaattatgccttgcaagaagaactggttctgacccctgtggattatttattgcgacgaaccaatcatgttctctttatgcgagatacgttggatcagatcaaagttggtgtgatcgatgcaatggcggattattttgaatggacagctgcagacaagcaaatgtatgccgaagaattggatcaagtaattgcggaatcagatttgagtgccttaaaaggaggagaatgatatgagtgatgcaacacaaatctttagtgaatttctgggaacggcaattttagttttactgggggatggtgtttgtgcggcagtcaaccttaaaaagagtaaagcagaagcttccggctggatcgtgatcgcgacaggctgggcaacagctgtgacgattgctgtttatgcctctggtttcatgggacctgcccatttgaaccctgctgtaacgttgggaatggcaatgacgggtaatttttcttggggattggcggtacctttcatgttagcacagttagcaggcgggatcgtcggtgcaattcttgtttggctcaattacttgccgttatgggatgaaacagaagatcaaggcgctattttagggacatttgccactggacctgccgttcgtaacttagccgcgaatacgatgaccgaagtgatcggtacgtttgttttagtatttggcttgttggcatttggtgcaaatacctttacggatggcttgaacccaatcgtagtcggaatcttgattttggcgatcggtctttctttaggcggaccgacaggatatgccatcaacccagctcgagatttaggtccgcggatcgcccatcaaattttgcccatcaaaaataaaggaacatctgactggggatatgcgtttgtaccaatcattggaccttttatcggtgcagcattggcagccggactattcatgattttaccgctctaattgactcattgatcttttaaacgatagcgatctgctagatggctatcgtttcttttttttgataaattccttcgtttgattgaattcttccagcgaaagtggttaaataaagaagctgaaaaaagagcaaaggagcatgtatgtgaaaaaaattttgcgtgtttgtttatggcttgtcggtattctagtaacactagcactagtcgtactgattgcttttcaagtgtcgcctcgtccaggggcctatctgattggaaaaatgtttaatgacgaggtgaagatcacagatgaaaccgcgtatcaaaaaagtttgcctcatgtgacggtaaaaaatgatctgacctatacttctgactatgatcgtagtacatttgacctctatcatccccaaggtgcttcgaaagtaccagttgttttctgggtgcatggtggtggttacgtcggtggtgataaggaaggggccaaagaatttgcgacctacttagcagatcgcggacaagtggcagtggtttcattgaactatgagtgggctcctagtctagaatacccagggcaagtcaaacaaatcaatcaagcctatcaatcgatcaagaaagaggcagcgcaatatccaatgttagactttaaaaaagtcatttttggtggagactctgccggctcacagattgctgggcaattcttagcgatccaaaccaattcggattacgccaaagatatgaagatgacgcaagtgatcccatcaggagatataaaaggattcatttcttattgcggacctgttgacttgaagcaaatggctcatcaaacttctgatgatcgcttcatgaaattctttgttaaaacagtcgcgtggtctttattaggaaccaaagattggaaaaacagtaaggaattgcagcaagtgtcattagtcaataaattgaccaaagaatttccgccaacctatatcacggatggcaatgcctattctttccaggatcaaggaatcgcttttgatcagaagcttcaagagctagatgtgccagttaaatctctcttttacaaagatgttcctgaggcagtcaatcatgaataccaatttgattattcgctagaagaatcaaagaaatgtttggatgaaaccctcgacttccttaaaaatgtgatgctgtaaggcttcaaaacgcgaaaaaaagttgaccctaataaaaggtcaactttttttaatctcctagaccgatgaaatagtcatcatctttcattgcttctaccgttcctaatagatagccattccccacttgagagaagaaatcgtgattgctggttccggtagagataccattcattacgatcggattgacatcattggccgtatctggaaacaggggatcttggcctaagttcatcaatgctttgtttgcattgtagcgcaagaaggttttgacttcttccgtccagccgatcgcgtcatacaattcttcggtgtaccgttcttcattttcatacaattcatacaacaaatcgtacatccagtccttcaaacgctgttgttcttcttcaggaagctcattgaaacctaattggaatttgtagccgatatacgttccatgtaccgattcatcacgaataatcagtttaatgatctctgcaacgttagccaatttattattgcctaaataatagagcggtgtataaaaaccggaataaaaaagaaacgtttctagaaaaacactcgcaattttcttttcaaggggagtcccgttcttatagatctcattgatacgttctgcttttttttgcagatagggattcgtattggtccattcaaagatttcatcgatctcggcttttgtattcaatgtgctaaagatagaagaataacttttggcatggacagattccatgaattgaatattgttcaaaacagcttcttcatggggcgtgcgtacgtctttacgcagctgatccattccgctttctgattgaaccgtatcgagcagtgttagcccgccaaatacataaccaaccgttgttttttctagatctgaaagtgtccgccaatcatctaaatcattggataatggaatacgcgtatctagccagaattgttctgtcagcttttcccaagttgatttatcgatgatgtcttcaatcgcattccagttgattgcttcataataagttttgcccatcttaggttcctccaatagtagtcttgataccagagacaagaacaaaaggagcctacctgattgtcagtcgcaaatgccttcaacctttcgggaggatctctaatccatctcgatcatgctttggtgaagacatttgattcaatcaggtagtttttttgttcttagtcagtgcttagcttagcttagcgtgcgtgattaaatcacacagctttcgcattgattgctgccgatttcttctgcgtcatccgtaaaggtccgtacataataaatcgatttgatccctttatggaacgcataatgacgcagaatgttcaagtcacgggttgtctgtttactggtttctttccattcatagagcccttctggaatatctgagcgcatgaagagggtcatactcattccttgatccacgtgtttttgtgcagttgcataaacatcgataactttacgcatatccatatcataggctgagcgatagtaaccaatcgtatcattgctcaagtaaggtgcaggatagtaaatcttcccaattttcttttcttgccgttcttcgatcattcgtgtgattggatggatactcgcacttgtatcattgatataagagatagaaccatttggcgcaacggctaaacggttttggtggtacaagccgtcttttttgactgcttctgccaatgcggcccaatcttctccagaaggaataaagacaccgtcgaacaacgctttgattttgtctgattttggttggtaatcccctgtgatatagtctgtgaaatagctgccatccgcataagctgatttctcaaagttatggaacacttcgccccgttctttggcgatgttattgctttctacaagtgtccagtagttgagcaacataaagtataagtctgtgaattctaatgattcaggagaaccatattccatttgattcttcgcaaaataggtatgcaagcccattgcacctaaaccaatcgtatggttcaacgcatttccattttgaatagaaggaacaacgtcgatgtcagaagcatctgtaacaaaagtcaatgcgcgagtcatggcacggacggattttccaaaatcaggactgtccatcaaattgacgatgtttgttgaaccaagattgcaactaatgtcggtgccaagcacttcatattcttgtttgccgttgattacagaaggttcttgaacttgcaggatctctgaacaaaggttactcataatgattttgccatcgattgggttggaacgattggcggtatcaatattgatgatgtaaggatagccagattcttgctgcaatttcgaaatttcattttcaaggtcccgagctttgatttttgttttacgaatgttaggattcatgactaaattgtcgtattcttttgtgatgtcgatgtaagagaacggaataccgtattctttttcgacactgtatgggctgaataaatacatgtcttcatttttacgggtcaattcatagaatttatcaggaacgatcacaccaagagaaagagtcttgacccggattttttcatccgcattttcttttttggcagataggaaactgatgatgtctggatggaacacgttgagataaacgacaccagcaccttgccgctgcccgagttgattggagtagctaaagctatcttcgaacaatttcatgaccggcatcacaccactggcagcgccttcgtagcctttgattggcgcaccagcttcccgtaggttagacaacgtgattcccacgccgccgccgattcgagaaagttgcaatgcggaattgatcccccgaccgattgcgttcatatcgtcggtcaactggatcaggaaacaagaaaccaattcgcctcgacgtttgcggccagcattcaaaaaagaaggtgttgccggctgataacgctgatagatcatttcatcagccaaagccaaagctaattcttcatctccatctgcaaaatagagggcattgaatgctacacggtcctcatagctttccaaataggctgttccatcattagttttcaatgcatattgagaataaaatttgtacgctgccatgaaggacttgaaggtaaaatgctgttccgacagaaactgataaagttcttcgataaacgcaggacgatacttacgaatgaaagcttcttctaagtagtcatgttcaatcaagtaatcgattttgtcagtgactgaatcgaaagtcatcgtatttggctcaacattttctttgaaaaaagccgccagggcttctttatctttgtgtagagggatctgtccatcaacggggcggttgatttcattgttcaatttaaaatagcttacatctttgatttctttcaagctcataaaaagcaacctctttccttgttttgatcgtataaaaaaggatctgcaggtcttgacgactgacaaatcctccaaaaacacattggttaagttactgcttagctggccaattgacgtaattgatccggacggaagccaatgattgtttgtgcatcagaagtgatgatcggaacgctttggaatccttgttctttcaaaaactcaattgcttcaggctggttgtcaatattgatttcttcaaaagaaatatgattatcgcttaaaaagcgttttgccattttacattgcatacagttgttttttgaaaatagtttaatattcataatgatttcctccgagtcagtagtagttataaatctagtataaataagtcttggagaaagtcaacggaaaaacactatatctagtgcttgtgaaaattacatacacaatttatagtgtttagccagtttttatacagccaaaaaaagctgatttttcctagaaaatcgcgatttatagccaaaaagatccgagaatatgcaatggatgtgagtaaaaaaaaatcgaattgtgaacgaactttcaagttcctctgtgaaacagattgactttagtcctaaatcgctctattataatgataatcattctcaattgaacgaataaataataggaatctttcacaagaggaggaagaaatcatgaaaatggcgcaaacagaggcttccagaatataccaaatcgaagcgatcacgacaccaaagaacgtcacggcgcatttaaatgatttgggtcttcgggtaggcgttgacattctcatggttcaaaaaaactgtaaaagcggcatcatcttgcatcgggacaaccggatcgcattggatgccagcgtcatggagcagattgacgtgtccgaaagacaacagcagacggttttgacttctctagatcaattacatgtaggagagcagggcaaggtggtaaaaattgcaacgactggtgctttgcggcggcgattgatggatatggggatcaccaagaatgtgccgattcatatcgtgaaactagcgccactaggtgatccgatcgagattcgcttaagagggtatgaattgtcgctgagaaaacaagaagcagctttcgtctttgttgaaaaaggagtagaggaatgacctatcaattcgcattagtcggcaatcccaatagcggcaaaactagcaccttcaaccaactgacgggggccaagcaaaccgttgggaactggccgggagtgacagtcgaacgaaaatcaggaaagctccgtaaagccaaagaaatcacgatccaggatttgccgggtatctattcattgtctccttatactcctgaagaagtgatctcgagaaattatttggcagaagcccccatcgatgcggttttagatattgttgatggcacaaacttggagcggaatctctacctcactttgcaattgttggaaatgggtctgcctacaatagtgggaatcaatatgatcgatcttttaaagcgcaaagggatccagatcaactttgagaagctagcctatggcttaggcgtaccggttgtgggaatcagtgccttgaaacaacagggactgaataagctgatcgatgctgcaaagaaaagagcaggaaatggtcagtcaagcgtcatctacgattcacgtttagaggcggctttagcagagatcattggtctattgccaactgaaattcccgagagcaaacgacgctggattgctgtcaagctgtttgaaggtgacgaattgattcgtcaacaagtcgctttgactccgagcgatgaaaaagaattagcggaaatcattaaaatcacggaaatgatttttgatgagcaaagcgatgcaattatagtaaacgaacggtatggattcattcaacaattgttagctttagcaacagtcaaggaagaagagtaccgcttgtccttaagcgacaaaatcgaccgtgtgttgacccaccgcctactggcactaccgatttttgcccttttcatgtggggaatctacttcttatccatccaatcgatcggtacgatgggcaccgactgggtcaatgatgtcctgtttggcagcttagtcccggatattctgcagcagctgatgaaccaatggcaagtagcccaatggctgcaggaattgatccaagatgggatcgtggcgggtgtcggggctgtccttggatttgttccacaaatttttgtgctctttttctgcttggcgttattagaagattgcggctacatggcacgcatcgcttttgtgatggatcgcttgttccgcaagtttggtttgtcaggaaagtctttcattccgatgctgatcgctactggctgtggtgtacctggggtcatggccagccggactattgaaaatgaaaaagatcgccgtttgacggtcatggtcacgacatttatgccttgttctgcaaagctgccgatcattgcactgatttccggggcgttctttcccggcagttcatgggtcgcaccttctgcgtatttcattgggatgggggccattattttatcaggtatcgcattgaaaaagactgctctctttgccggcgacccagcacccttcatcatggagctgcctgcctatcatttgccgcaactaggaaccgtgttgaaaagtgcgattgatcgggccgtagccttcatcaaaaaagccggaacgatcatcttcgttgcatgtatctttatctggtttacttctagctacaactttacctttgatcgagtgggggaagaagaaagcatcttagcctttttcggccgtttgttagcaccgatttttgcgccactaggctggggcacttggcgaggtgccgtggcgaccattacaggattggtggcaaaagaaaatgtcatcgggacttttgggattttgtacggccaaagtggggtttctgaaaccggtacagagatctggcaagtgctgcgaggcgattacaccccagtagccgcctactcctttttgatttttaacttattgtgtgccccttgttttgcggccatcggcgcgatccatcgtgaaatgggggatagcaagtggacttggttggctattagttaccagtgtggactggcttattgtgcaagtctgattgtttaccaattcgggcatatcttctttgaaggagggcaactgacagtaggaaccttggcagcgttgattgttcttggtttgttgctgtttgctctgataaagagaccccaacaaaaaaattcaccactattacaagtagtcggagaagtagtaggaggcgaaaaatgattgcaacgattcttttaagtctagtgatctttggctatgcaggaaaagtgctttatcgaatggtcaaaaaaggcagttgttctgattgccatcaaagctgtccagtaaagcaagaagagaaaatctaaaaattatccatgaatctaacgccagttttattaggtaactagcgagtatgagtaaagcagttaggcagaaatgcctagctgctctttttatgagaaagggctatcaaaagaactgattctttagtatgattaattatatacatgatatataggtttgttttattaaagaaagtaagcagaaaaacagcatgaaacgaaatgtagataaagcaaatatcataaacagtaatgcaaacaagaacgagcgaacgttgataatgaaagttacattgggaaggcggagagcagcaatgaggcaacaacgaaggattgaacaacggaaaagacagcttctatgggcattgagcataagtttactgcttgttacgattgccgttagttattggctgattcacaccatgcgtactgggactgattcgtcaacaagctccccagataaccaagtgtcactttctacttccagccaagaaacaacaacggcctctcaatcgtcgaaaattactctgacagcaagtggcgatatgctctatcacagaccagtttatatgagtgcatttgatgggaaacgctatgattttgacaatgactttgagcaggtgcaaccgttgatcgcttctgccgatattgcttttggtgactttgaaggcaccatcaatcccaacaaagaactaggcggttatcctacctttaatgcgcctccgaatgtagtagaaagtatcaaagcagctggttttgatgtgattgatctagcccataatcatattttggatactggaatcgaagggcttaaaacgactgctaatgcttttcaggagattggattggagccgattggtgtcaatgtaaatgatcaagggatattcgtcaaagaagccaatggcatcaaagtagcgatgctggcttatgcttacggattcaatggcaatgaagctagcttggcaccggaagaatatacgacctatttaaaagatttatccatggaaaaagtagcagctgaaatcaaagaggcagagaatgtagccgacatcaccgttgttatgccgcaactcggtgtagaatattccttagaacctacagaagagcagcagaagatttatcgacaaatgatcgacctcggagcggacatcatttttggcggtcatccacatgtcgctgaaccaacagaaatcatcgaaaaagacggcgagaaaaaatttattctctattcaatgggaaatttgctatccaatcaacgctacgaaacagtcaacaactattggaccgagcgaggggtcattccagaagtcgagctcacaaaagaaggtgatcgtacatttttgagtgatatcaagctgcatccaacatgggtctctaaagagccgatccctgatcgtagatatgacgatccagagtttggcactaccgaagcctatgattttcaagttgtactggcagaagaatatcttcctggggggaagtatgcggataaagtacccgaagacaaacgccagcgaatcgaaaccgcgtatcatgaaatgatggagctgctaaatttaaaatggaaataagcagctgaatctgtctcactaacctatgacaggtatcaagcaggcatcttttgaggtaagatgtctgcttttttgctgttttatttagtagctcgatcatcttgcagcagatcttttaggagcatttagcccgctttttctagtaatgacacccacaagttgaacagaatgacaatcactgagagcagactagttgctgtaagttgataaaacagcaaaattcagcaaatttcattggctacagttcagtttttcaagcttttttctagaagagatgaacgcaatcactattgccggtaccagtgatattgcttatagtaaacgcatacaagaagactcgagaattctttgtacgagaggtggttaactttgttaagcgaattattaaaagaagactatatccaattggatatctcagtagaaaattttgacgaagcaatcaaggcatccgcacagccgctattgactgccggtgtcatcgaaaagaaatacatttcatccatcctttctatttatcatgagatagggccttatattgttattacgaaacaaattgcgctgcctcatgcacccatagagaagggggcaaagaaattagcattaggcttcactcgattaaaacgacccgtcatttctggtcatgaatcaaatgatcctgtcaaatttttgtttccccttagcgcaccagacaatgaatcccatatttcattgttatccgaactggctgagttgctgggcaacaaagactttctggaattgttaggacgaatgactgaaaaaaacgaactaattgcatttctaaaaaaatttgaaggagagaataactatgcataaagcactgattgcctgtcgagcaggtgtaggctcaagtctgatgttaaaaatcaaagtgaatgaggtcatccgggaaaatgactttccaatcgaggtggaacatgcgtctttagatgcggtctctggttttacgggagatctgatcattactttgacagatgttgccaatgaattaagagaaaaaaatttgcagcaaactatcattggaatcaacaatatcgttgataagaaagaaatcaaagaaaaaattgcatccgcattagtctaaaaatcaatgaaggagaaacgctcatggatttaattattagttttcttagtacgccagccgtacttttaggtttagttgcaatgattgggttattggcccaaaaaaaatcaatgaccgaagtgttgactggaacctttaaaaccatcatcggtttcttagtattcagttccggcggttcgatcatgactggcgcactacagaatttcaataccttattccaaaaaggattcaacatcgtaggggtcgttgcatcaccagaagctgccactgcactagcccaaacagaatttgcatttgtgaccagttgtacattgattctcggctttttgatgaacttagtcattgctcgaatcacgccatttaaaaatattttctttactacaggacatagtttgtttttcgcttgtgtgttgtcactgatcctaaaggctcatcagtttgctgatattccagcgatattaattggcggaacattactcggctttttctctgctgcgttacctcagctgtgccaaccatttatgcggcgcattactggcagtgatgagaccgccattggacactttaacatggtgggttatgcattgtctggttacattgggatgctatttggtaaacacaaagataaaacaacggaacacatcaattttccgaaatggttatccttttttagagacttcttgatgggcgttgcggcagttatgctagtgctattctatatctccgcattaaaagcggggcgagacgtcactcaagaattagcaggaacgactcattggctggtctttcctttcgtgcaggcatttacctttactgcgggaatgtcgatcttgatgactggtgtgcgcatgttcttgtctgaaattacggcggcatttgtttcaatctcggaaaaattcattccaaattctcgtccggcattggatgtaccaactgttttcccatttgcaccaacggctgtcattgtagggttcttatcctcttatgtcgctggcttattgggagtattgatcatggtgcttttcaattttccagtcgtgatcattccagcagcccatatttgtttcttctctggaggaacagccggcgtttttggaaactctactggcggttggcggggagcgattgcaggatcctttgtcatcgggctgttactcgcctttttaccaacagttctttacccggtgtatggtagcttaggcatcgagggatcgacattcccaaatatcgactacaatgtcatgggaattttattagataaactattaagtttgtttggtcagtaatcgatcgctaagatatttgtcatcaactgaacttctgaatctttgcacgcaaaaagaactatctcaaagtgtgcaaagattcagtgaaaacggatcagtgacagaaaggattttatatggaaacaacgaatttggcttattttttgcaaacaaccaaagatgagcttacagcttatttgaatgagatcaatcaacaacagttgatcgatgcagctgaactgatcgttgctgcaaaaaaaaagaaggggcgtgtgcatgtgactggcatcggtaagccaagtcatgttgcggaatatatagcagctttgctttcttccacaggcactcctacctattttttagatggaactgaaacgatccacggctctgccggccaagccgaaaaaggggatgtcgtgattgctatttccaatagcggcgaaacagaagaattgaaaaaatcgcttcttacgctcaaagctttaggaataaaagtcatcggagtgagtggaggtatcgactcatggctgcaaaaacattccgatgccttcttgtttgctggtatcacgaatgaaggagatccgttgaacaaacccccacgaatctcgatattggcagaaatcatcgttttacaaagcttgtcgattttactgcaacaagaagctgccattgatattgatgattattatgcatggcatcctggaggaagcttagggagtgctatcatgcaagaaagaagtgtcgaagaatgaagatcgaaggaatcattacagccatggtcagtcctttagatgagcagggaatcgatcgagcagccactagaagactagttaatcaattgattgcgaaagggatccatgggttatttatcctagggaccaatggggagttttatgccttatctcatgctgaaaagctcgaattggcaaccatcgttgtagaggagacagcaggtcgggtaccaatatttgcaggagcaggtgggatttcgacagaagctgtcattgatttagtgaatgaatttcaaaccattggagtcacagcggcttccatcatcactccttatttgatcaagcttacggatcaagaagtagtccaacactataaaatgattgctgcaaagacaaaactcccattgattctctacaatattcctaagaataccggcattgcgatcaatgaaaccatctttaacgcattgctgaaaatacccactattattgggatcaaagacagcagcggggacatagaaaacctcaaaagctatctcaaattgaatgagcgagacgatttttctattttagtaggttctgactctttgatcttggaagcgttggaatgtggcgctgatggggcagtcgcagcaacttccaatgtcttaacgacaactgacttagctatttatcacgcatttaaaagtggtgagacccagaaagctagaaactatcaattaagtattgaagactttcgccgtatcttaaagttcggtacagtacccagtgtcctaaaatactgcgtaggttggatgggaattcctgtcggtgatcctaagctgccggtgctgccagtagatgaacaggactatccagagatccatcaagttttagcggaatatcgaaaagtggagggattcgatgaataagaagctcgtgatcctcaaccggatccataaagaaaaaatcatggcgatcgtacgggtcgaaacagtggaacgagccgttgaaattgttgaaggctgtaaagccggtggtataacttgcttggaaatcagttatacgaataacaatgccggggaaatcatcaagcaactgaaagaaatctatcaagacgaaatcgttgtcggtgctggaaccgtattggatagcgaaaccgctcgggatgcgattttacatggtgctgaattcatcatctcaccggctttttcaaaagcagtcgcacagataagcaatcgctatcaaatcagctacatgccaggctgtacttctatctctgaggttttagaagctctcgaagcaggagcggatatgatcaaagcatttccaacgtcttctttacatgggccaaggatcgtctcaacaatcaaaacaccattgccgtttgtcccgatcttatcttcagggggcgtttctttgacaaatgttacagaatggttgaatgctggtgtagaatgtatgggagtaggaacattattgacaaaaggttcgcaagcagaaattgcaaagaatgcggcacgattgcgcaaagaaatcgacacatttgtgaattaacaaagagaggagagagggtcatgatcgatcaacgcacattacagctgatacagaaaatgattcaaaaaccattgatggaacaagaggagataatgcgcttcttttctctgtcaaaaaatcaattggattatgcaatcagaaaaatcaatgaactattaaaagcaaataaacagccgttgattcgatcagatccttattttattcaattagcaccaaaggcaaaagctttttttctgaatgatttcctaaacggtgccgtttatacccagtatgagatgaatagtgaagaacgaaaaaaatatatttttctgatgttgttttattatgaatcagactatctttctgtgaatcacttcttgtctgcgctgcgtgttggcaagactacctttatggcggatatgaaaaaattagaaaaagaactgtctctgtcaatgatcactattgggtatacgcggaagaacggctatgggctgattgggaatgaagaaaatctgcgtaatttttttatgaagatgatgtttcatgattttggggataatcaggaggagtttgtctatcattatttcttggtcaatgaaaaaattgatggcttctcacaggtcgagggtatcgcaagagaaaaactaaaaaccttttctttagaattagtggagaatcgcttgaatgaattctcttatttgtttacgatgatccttcctcgtttaaacaaacagtggcaagatttttatgaaacctataattaccagactttttttcagatgaaagagtatttatttgcaaaagaattattaatggaatttggtatcacaaataaatcagcccaattgtatatctgtgggtggctgctggggatggcgctaggggataccacttatccatcagcggatttttcgattattcatgaactggtcgagcgcatcatcaaacgctttgaactattgtccggcatccgttttaaagataagcaaaaagtcatcaatcaattatatagtcactttcgaccagcttattaccgcttgttttttcaattgccaattatcaatcccttacataaaaaaattattgaagaatatgaagatctgtatcagattgttcaagaaacattgcgtcccatcggaaatctttttgaacgcggaatcccagaagatgaagtttcttttttaaccatccactttgcttctttgatcaatgattttgatgaataccaagtcaatcaaaaaattggtgtgattgtttgtccgaatggaatcggtagctctgccttgatctataatgaattaaaaatgatctttccagacattatttttatcggacccattgagaccaaagaactattgcttgagcgccctgaatgtgacctgatctttactacggtacccaatgtcagtctttatacactgaaaaagccagtttatgtggtaaatccaataatgaccaatgaagaaagaaatcaattgattcaagaagtttaccatcagcccagcgaagctatttctctgattggggtggaagaacttatggctgttatcaaaaagcatgcgacaatcgaagatgataaaagtttgaagaaagaattgcaattgctccttaccagaagagaagtcaatccagcttattcagcaaccctaggcgaggaaagaaagcccgttgcgttgattgatatgcttaacccacagtacattttgactaatataaaagtacgctcttgggaagaggcattctatttggcagcaacgccactgatcaaggatcaagtgatctcacgtggttatattgatacgatcatccaaaacgttcgcaaagaaggaccttttttcattatcatggatcaagtagcattgcctcacgcacggccagaagaaggcgcgttaaagctaggcctaggcatcacagtcttacaagaaccagtgataatcaacaaaaaagcgtcgattaaatacatcttcaccctctcagcaattgatcacagcaaacatctatctgccattgccgagctcgtcgctttgttggaacaggaaagttttttcaacttactcgaacaagaagccgatcctcaacaaatctttgactggatcgcatcttttctcttgaaaaataagcatatggttccgatgtaattggactgaataactacaccagagtgatcacccccaaaaaatctaacttattgggttgcttcaataatcagtgttgtttgtgactctttccactacaactgacacacgaagatgtagataagataataccactgaacagtcaaagagcatttaggttacttgatgagagatcatgcaataaatcgatcgtgcttttaatcagacgtatacgcttgaggtaggttatttacatctaataaggacatgggaatcctatccttattgaatgaggcactatttaagttattccgctgaatcatgcagtaaacccgcttataacatccagaaggatcatttttaataattaaattaacatttttcatataaaaagagcgagagcaatcattgcgtattattgattgcacttgctttttttttagattcactcctttttttagtcaaaatgaaggtagagatgaatttgggacagcctttaccgtcaagttatactatcaaaagattagactgaggaggggtgtggtggaaaacaacaatttaagaaaaaaattagacgatttgtcatgatagcagttttggcgctattgactattggtctcttccaaaaagaagtttttgcagaaaacgtcaatacgttcacaatccaaccactagatgagaatggaaatgtgaatgagaatggctattaccatatcattgacgaaccaggaaagcaacgcactgtttcaattcgagtgtataacctttctgaagaagaaatcagcgtaaatgtgaccgtaaatccagcttctacgaatcaaaatggaatccccagttatttaggggaagaagcgtatgatgcttctctcattcatcgaatggatcaactggtcgcaattgaagagagtgaactcctgatttctgcaggttcttcggtactcacaacactgattatctccttaccacaagaagaatgggaaggggatatccttggaggcattcgttttactgaaaaaaagaatcagcagagtgaacaaactgtgactcatgaagtcgcctatacggtaggcattcttttaaatcgagtaggcgggtcagcagttgaaaatgaattgtctttaaatgaggtgaccgcgagtcagcgtaattatcggaatcacattgaagcaaatctacaaaatagagctgctgtgattgttcgcgacatgtctattcagtcaagcatttatagagaaggaagtggaacccctatctatacatatgacgcatacgagttgcgaatggcaccaaattctaatttcaactttggcatccctgctggaaatcagccaattgaagcagggaattatgttctaaagacgcaagtaacagctgatgaaaaagagtatcgctttgaacaatctttttccattacgaatgcgaatgcccggcaattaaatcaaagtgcggtcaatctagagcggacgacatcctacatgtcatatgggatatttgtcggaattggcgtgatcctcgttcttttggtgatgtggtggactcgaaggcggactcggagaaaaaagagaagaaaacgacccatgatataaaaaggactggcttatcggagtcatccagcaaattaaagagcataaaatgcttaatcgtaatgaaatgaatgagcaggatcttgtgaaactatgaaggaacaccctgtaaaatgaacttcaaaaggataacggaggaaagaaaatgaaaaaaacgacacgaacattatcaattgtacttttagcagctagtcttggattgggtagcaaaatgggggatgcggcaacttatgatgacgcagcgaatattacgactgaaggaaaagtgaaaatcttggaaaatgactcttcaaacccagtcgttcctgatccggagaatccaggaaatgaggttactcccgaagaaccaaccaatccttatccgggacttttacggatcaactatgtatcaaactttgattttggtcagattcaaaatgtctcgcgtgcgattgaacaaaaagcgcggctcgatcatgtgtgggtaaacggtgaagaagtctcgcgtgtgccttttgtcgcgacagaagatcgccgaggaagtgaacggctaggatgggaattacaagtatcacagccgaatcaattggcagatgcgagtggtcatgaattgattggggcaacgattactttatccgggctgcgttatgtgaatgcaacggctgctacaccaatagtcaatcaaaatgagatcgtcctcggagcagcggcacaaacgctagccacagcagataccgcgcaagggtcaggtgcttgggcattagcattaggacaatcaaatggagaagggcatactgacggtgttgtattgcgtataccagccaataccacagcaaacaatactgaatattctactgcgattgtttgggagctggttgcggatccgactacaggaataggtggataaatcaccctaaattcttctggattaatttgaagggaaaggcgcgatcaaatgaaaagaaatgtccttatcaccatagcaagtttactcgttacagggcacttgcttccctcgacaatcctatttgcggaaaccgttgatgcgtcagagagacaaagggcagaagaccaaagttccactcttgattcagatgaacatcaattttttgaacctgtagatgcagaagatcatgcggctgatgaatcagagggaaacttagatttgcttgattcagggttggatgaagagaacattgatcctgaattaagcgcgattccagacagaacggaagagtctaaaacgattcaaccaagtgaacatagcggttattctgacgaaactgtgctcacagccgaagcagtccctcaaaagataggactaggtgggaaatttgtcgaggaacgactgaatgagttagtgacaaacgtcaggctgaatggagatgaagtcgcaggtgaggactttaaagtcactcttttgaatcaaccgaacaccactttcctgggaaatctgcaagtcccaatcaccgtcgtacatgtagaaacacaagcagcgactcagataaatgtaccggtggaagtgatatggggccactcgatattttcacgagaagcagcaatcagtgctagcactggagtaatcagtcttcatatcaatgataacggaccatctcttgttgcatcagaaggatttggcaattcttggccgaatcaagttacatcaagaccacgttatacgatttatcgcaacgattacaccaaccaaacgctgcttcctttttttacagtaaaccaatcaagaagcagtgtcgtacaagcttggaacaatgtgttaaacaatagtccgattgacttcggtgatgtgatcggattaagcgtaaataggttcgcagtagccaatcagaattacaatggagccaatacatgggtcacgagaaatgaagaacctgttcgagaggcgattggctggccagaggctctgtatatgatgacaccaagcggcttccaattgttgcgagtgaatcaattaacgacgaataaactaacttttgcagctagtagttcaacagaagaaatccttcagagaatgacagaatttttcaatttccatgaagaatttacggaacaggaaaaagaagagctttcgtttgatttgatccgttctgatgcactattaccaggcaaagaaggcaaagcagttgtacaagtgacacaaacaaaagaaaatgggtaccgtttttcaatgacgtacgaggtatcctttacagttggacttggacgactggagttggcgggaattgctcatggcaattttgattttggcgacgtcctaaaaacgagccgtagacaaaatattccagcgcaaggagagtctgctccaacgattatggtcagtgattacagtgatactgcccagtggagcctttatgcgtcgatgaacccttttataaatgaaagaaatcaggagttaagagaagcagccatcgctttgaaggagttgaaagtgatcgaatctgttcatacaggtatttccattcccaaaaatgatatcctgttgggaaccacccctcaaatgattgcggcaagagatagatcaggaacaagagatgaatacggaagaacaatcattcaaattggagaagtaaaagaccagacattaaccggtgtgtcacttcatttgcctgccaatacacctgtggacaagggagagtatcaagcaacaattacttgggaactagtcggggatccgacgataggaggcattcgatgagaaagagagtggtcgtgtttttggtcggtctctgcatttttatccccgtcttttcaaggagcacagtgattggacatgcgacaacaaatgagaatcgtgcggttgtgagcttttaccaagaggaagaacccacccaaccagacctcgatgatccaagaacactcccacaaactggaagcaccttttcttatataggaatggtaggcttagtcattgtctttgtgatgtggtacttaaaaaacagagaaaaaaaacgtagaaggacaaattgaagatttcacagcgtgtttgtaaaagagggacatctttcgaggcaaagaacagcaaaaaaaattggttataccatcggcaggttcttcatcaataaggaatgacttgtcgtatagcaaaaaacctgagatagaatgatcatcattctatctcaggtttttttgtatcattttaattgattgaagaataaataagaatcgaacaatttttaacaagagtaattctttcatttgctaaaaggaccttactggccatttaatgtacttacgattgataggaatatctgtattagccacaaagcagaagctttttaagcgaaagaatatcttttaaaagagggcataagaggttccaccttcgaacttgatttgcttaaaatccatcctaagatgagcgttcactgggctcgaatctacggctcactgattaagagtgtgattgtttagtcgtttcattggggtaatagctgaaaggaagagatttagtagatgcaacctgtttgttaaaagtattcctttttgtaaagctcggaataatttcataataaaacagaggagcgccgattttattttttttaaaaggttgcaacttttcataaaataactaagaaaagaagtggaatgagctccgctatactgtttatagcaatgcgaataaacgaaagaaaggatgaaaaaaatgaagatcagtaaagcagtattaaaggcaattacgttgagtagtgtgctggtattaggtggtacatacgcttctgcggctgagcaaaatcaggcaaacccttctgaagcaacgacaccgttacaaggaaacctaggtttatcagaaaatggtgggtacgatcccaatccgccgagtgatttaaatgaaaaaacaggaatcaaaaatagctattttggtatttcttatgtgcctagaacctttgattttgggatcaccaaattgcaagatagcataaaagagcaaacaatcactacgacgaataaaaatggaaaaacatttaacgttggagtgaaagacaagcgacgggaagatacacaaacatggtcattgaatgtgagacactcgattaatgtcgataatggctatcaaggggtggagctaaaggttcctctggtaggtgacgttaaaagaaatatgaatgatggggatactccttttgaagcagacgatttaactgaacaagtcaaaaaaaataaccaaaatgaagtaaataaatctgaaaatgagcatctaatggtcacatcagaggatcagacgatcatgtatacgaatggcggacaatttgtcaatggagtctatgatttacagttaggcgatgtcggtttacaaattcctgatccaagtagagtgccagatcaaacatttaaaggaaatgtgacttggacattgaccaacacgccaatgaaacaacattatttaacgaaagaaattcgtaatttatttaaagatggcaactgcactaccttaaaaacagatatacgctgtcaagatgttgaagcagcataaaatcttccagagtatgtctcgtaaagggaattgtttagataactcacctatggaaaacttctttggtttattaaagcaagagatttttcacggagaagtctatcggagtttagatgaattgaaaacaaaaattgaccaatatatctattattacaaccataaacgcatcaaaaagaaattaaattggcgaagtccggttcagtttcgagaagctgtaaaaacagctgtctaacagttaatcttatcatacaaaaaaggagtggatttctccactccataaaagtctaactttttggggtcactacactctgcaaatgagaaggggcttttttattttctgtatttattttctaatgctaaagcttttgctgtgaagttggtaaagtaattatctataccaagattgattgccttttttatttcactagtggagtttattgtccaaatattcaaaagttttttgtggccatgaactaatttaacattttcttttgtcatcatactcttttcagcagaaactatatctactatgtcatacgtgactgccttttctaattcgctttgattcttaactaataagagttttggcatatttggaaaacttttgctcaagtcttgcaacggtttaatatcagatgcttgaactacgatattatcttccaagttattttttttacaagatcttcgaaaagcttcgtttgattggagttttcctttagttctattacataattcacagtattcccgtatcgattaaacacatcttgcaaactcaatatcttttcattatcttcagttcttaaatcagaaatttcatcatcggtcatatctacaaaaagtttgtctacaccagttattctttttgctgataaatcatgagaaacataaagagtgttgtctctggatgtcacaagatcttgttcgatatattttgatccgtataaaatagccagatcataagcagcgactgtgtgttcaatctcttctccagaggctcctctatgggagtatacccttgaactggaatcgttagtgttttttattaagtaaaatgttattactgaagaaagaattactaaaaatattaagaatggaattagtatttttgttttttttatctttttacgatgcatacggtacctcaaggtttttcttttattgtaccagaaaaaaaatatataaaggaacagtttttctaactggggatcctaaggcataaataaatgtgcaaataaattaatcatttatcgacgaataccgacaactaggaactaaagatgataaaaatcaacaatatgacgtattcaaattagtcatattgttgatttttaatgttaattgaacagcaacaacaagaatccatggtaaacaaatagcccgctgcggagagcttataaacgaaatattaaacgttattcttttcatttgaattaaaaattattttattgtagactttgtaaggcgatattaaatcgtcaatgaagaggattaggcgggggaaacttggggaagtgtgcctaatcctcttcattttaagtgtacctaattttccaataagaagcattactttttggtaagatgtacatatgacttttatgttttttaaacatatgcaatttaatattaacctttagtattgaattactcaagggccaggtatagaatgtaagtaccaaccaattttttaatttccaaatcttctttataagttcccactctctctcggggagggtgggtcgttttttttgcacaaaaaagcacagcgtatttacacacactgcgcaagtgaaactatgtttctacatcgtaatcattatagcgtatttaacgtcctatttaaagactcaaactcaatcataatcttcgtcttgccaatcaccgaatacttcttaacaacaaattgcttccgatcgttaaactcaccagcaaccacaacctgcattccctcatccacatctgccaagaagtttaaactatgtgctgcaatcaaacaattcgtaccgtcaagagagaaacgcactaaagggttcctcgacattttcaacactcgtatcttcgaaactacacctctcaatgatttcatgataactacttcttacttctaatttttagtggagattcaattatcatacgatcataaaatttgccattttttataaagcgttcacgttttacagcaatagatttatcgctttgagctaatacagcaagaatggataaatctaagaaaatcttatcatcgtcagaaagggtagagtattcgttagcaagttttgcatcaatttgttctgcaatcatatcttcaaacatttaaaatcactcctcgcaagaattatacgaacctatgttctatttgtaaacaaaaaaaggcgaaactcctcaaaaataagttccgcacagaattgttataaaataaaagaagataaatttatatacccacaaagtatacccacagcataaaaaaagccacatcaaggtttcttttctaaactaccgaagtagccaagaaaccttatgtggcgtgggtttggcacccaatgggccgtgaggggctcgaacccgcgacccgctgattaagagtcagctgctctaccaactgagctaacggcccgtatcaaaattactttattatcttagcactccgacttttaaaaatcaatcgttctgttaaaaaaaaatccgtttttttatctttcgtttcaaaagaagactacccatagagtacatactccgtaatacttatccccttcaaaaatcaaattcttttgttttcctaaattttgagcagaggactacaatccaataccagtatatggtaaaatttatctagttatcaaaaccagataaaaagtttttgataaaccaatattctgctatttaagatggagaagattatggaaaaattacgttcagatttatttgattggagcgagtcgctgaattcctttcatttgccgcggtgggaagagctgccaactttggaactgtacatggatcaagtcattacgttgatcgatcagtacttgtcgccggtaatccagtcggaaaaacattcactgctgacatcatcaatggtcaataattacgtcaaaaaagggatgatcccacccccagagaaaaaacggtataaccaaaaacatttggcatttttgattgccattacgatgttgaagcaagtgttgacaatcccagaaatcaagacgggaatattgtttcaaggaaaagtagtcgggatacgaaatgcgtacaatttattttgtgaagaacaggaaaaagccatttggacagtctgccaagaggcagcagggtcaaaagaagcggtgtctaccgatccgattccagtagaactgatcgcgatcaaaggggcgacccgttcgtttgcaaataaattattggcagaaaaaacgattgaactagaagtaaattacttggaaacgcacaaaggagaatcccatgaataaagagaaaattgccctgcttgtcgactcgggaaccgatgtcccggcagaaatcatgtcacaatatggtatgtatatgttgccattgcagatcatatacaaggatcggacgtatacggataaagtggatattacagcggaagagatctatcaacgattgccgcaagaaattcctagtacgtcattgcccgatggcgaaaccatcaacaagatatttgatcggatcaaagccgatggctatgaacaagttctggcagtcaccatctctagtgggttgagcggtacttataatgttgttcgcttgatgggagaacaacggaatgacttggatatttttgttttagatacaaaaaatatcgggattggtgctggattacaagcgatcagagctgctgagttgctgaatgagggagtcacatggcaagagctcaaagaacagctgctacaagaagttgtccgaaataaggtctttttcaatgtagcgacattggagtacttgcaaaaaggcggccgaattggtttggttgcttcaattctcggaaatgccttgaaattgaatccaatcatttcttgtaatgacgaagggatttattacacagtagcgaaatcacgaggacgtaaaaagagtttggacaagaccgttgaactggtgaaacagtacattggaaatcacaaacaatttcgcctagccgtggcccagggggatgcgttggcagaagctaaagaaatgaaaactcgtcttgaacaagaatttcctcaagtgaaagaaattttctttggacagatttcaccggcactggttgtgcatacagggcctggattattaggcgtcggagtgcagctgttagacgaaacggggatttgatcgagtgactgtgatcgttttctaagagccgctcacaatcattcattaatgaatgttaaaaggtatgaaagttgtcttttcaactttcatacctttttttgtgccgatgagtgaaaagaaacctgtttctctagagatgccgcaatggtcagtgacatgaagggttggcgctcttttgctctcttttgctcctatttactcctaagttattttcgttgaacaaaacaagcagtataatgatttcatagaacaaagcaacagttctccaaggagacggatgcttacagatggagctttatgctatccggattacttaaggcagtatcttgagttgtttatgaaaaaggagtgagtgacaatgaaagaatatgtttttgaatcaaccatttattcttctgagattggtaaaggtggagcatacgtgatttttccttacgatttgcgggctgaatggaataaagggcggctgaaagttcaggcaacatttgatggcgttgactatcaaggaagtatcgtcaatatggagttgaaaaatcaagacggaagtatttgttatattttaggaatcaagaaagagattcgcaaacagatcaaaaaagacattggcgatactgtaaaagttgttgtgaaacctattacggaatgaataagttagcaatcatgagtatgaaaaagaaagaacatcgatacaaaattttcttaagaataagcatagatcaaggctaagatttgaggaaagatgaaaacacatcctaaatcatgtataataagtaggaaagaataaaaaatgaggtgacattttttgaaaaagatcctagtcgtggacgatgaaaaaccgatctcggacatcgtcaaattcaatttgacaaaagaaggctacgaagtatatacagcttatgatggtgaagaagcattagaaaaagtggcagaagttgaaccggatctgattttattagatttgatgctgccgaaaatggatggattagaagtggcacgtgaagttcgaaaaaatcacgatatgccgattattatggttaccgccaaagattctgagatcgacaaagtgttaggactggaattgggtgccgatgattacgtgactaagcccttctccaaccgtgaattagtagctcgtgtcaaagctaatttacgtcgcggttctgcttcggcgaaagaagcagaagaagcaccgaatgcagaattgacgatcggtgatttgacgatccatccagatgcgtacatggtaactaaaaatggcgaagcaatcgaattgacccatcgtgaatttgaactaatgcactatctagcgaaacacttaggtcaagtcatgacacgggaacatttgctgcaaaccgtctggggatatgattattttggtgatgtgcggaccgtcgacgttaccgttcgccgtttacgggaaaaaatcgaagatagcccaagtcatccgaattacttggtcactcgtcgcggagtcggctattacttgcggaaccctgaacaggaataagctatgaaaaataaggttcgcttttttcgatcagtgaacttcaaaatcgccctgacttttatcttgatcttattgatttcgatccagattatcggggcgtattttattcgcgaattagagaaaacaacgatcgatgcctttaagcgcgacatggaggcaagagctagcacgttggtcgttactctaggttcagaacttagtcgaatggacgccgaagacagcctcgattgggatgcaatgaattcttctttgaaccggatcctttccagtaccaactcttctgagattttagagatgcgggtcgtagatgaacaaggaatcattcgggcaaccaccaatatcaatgatcgaggttcagtgggtgaaaaaaacgattaccgagattatgatacgaaccgtagtgaagtgttgtatgacgaatcgacaggacagcgggtctacaacattgtccaatcgatccagtcgcctacaggggatacggttttaggtacattgtacctgcgaagcaatctggaacagaaatacagtgaagtcagtgatactgccgtgatttttgtgacggcttctttaattgctgcagcgatctcaattgttgttgccctacttgtttctcgatccatcactcagccgattggggaaatgcgggaacaagccattcggattgccaaaggggattatagccgcaaagtagcagttcatggccaagacgaactgggacagctggctgaaacattcaatcagctaggagaacgtatcgaagaaacacaagaagcaatggagtcggaacgaaatcgactagatagtgtcctctcccacatgaccgatggcgtcgtagcgactgaccgccgtgggaaagtcattacaatcaatgagatggcgatgtcgttattgaatgttacttctgaagaagcagtcggtcaatcgattctgactctgctccaaatcgatgaagaatacaccttgcgtaaactgctagaaagtcctgatgaaatgctgatcgaacggccgaacaatgacatcgttggaacgaatttgattttacgaatcgacttttcaatgattcgccgtgagtctggatttatttctggtttagtagcggtgatgcatgatgttacagaacaagagaaaaatgaacaagagcggcgagagtttgtatccaatgtgtctcacgaattgcgaacacctttgaccagtatgcgcagctatattgaagcgttgagcgaaggggcttggcaagatccagaaatcgcaccgaacttcttgaaagtgacattagatgaaacggatcggatgattcgaatgatcaatgacctactgagtctttcacgaatggacagcggcaatgcgcaactgcaattggaatacatcaatttcaatgagttggtcagctttgtgttggatcgatttgatatgatggtgacgaatgagaacaaaaaatatgtgattcgtcgtgaattcaccaaacgtgaactttgggtcgaagtcgatacggataagatgattcaagtgatcgacaatattatgaacaatgctatcaaatattcacctgatggcggtgtgatcacagtcaaattgatggaaacccataacaatatcgttttgagtatcaatgatcaaggcctaggcatccctaaaaaggatcttaccaaaatctttgaccgcttttaccgtgttgataaagcccgcgcccggcaacaaggtggtactggtttaggattagccatttcccgcgaagtgatcaaatctcatgggggagccatttgggcagaaagccgagaaaaccgcggttcaacattttatatcatgttgccatatgaaccgtatgaggaggattggtgggaatgaaagtctcagaaaaaatgattcgtttaggtctgatcgttatggttgccctaagcttttacttttcctacatgatttggctgaatcccaccggttacgatcgttcagtcgaacaagctacagatacagtcaatacgagtattcagacctacaaacaaaaaagtgatttatttttgccattgtatttaacctggatccaccaagatgaagtcaaggaaaccaattctgaaacgttgattcgtgacgttcagggactgctctcggatgctcaagtcaatgatctgacggtacaaaattatgattccaagtctttttcagaggcagcaacattggatgagggagtgacgttggcgtattacacgccgttcttactaaatgattacgcggagacctttgatgttgaattggcattaggtgtcaacgaagccaacaaaatggctttctcccatattcaaatcgatttgaaagagaataaaatccagtttgtgaatttggaagaatcacggatcattgaaggcaagattgactgggataaaaatgatgtgaatcgcattttgaaagataatccaagagaatggacagcgatgcgccaggaagaatcaggaaaaagcaatcagttctatacacaggacacgatcaagctgaaaaaatacagctatgtttcctctttgcaatcggcgaatctctttcgagaagcattttttacttcgccaaaagatgtcaaagtcaatgatgatagtgtagatacttattattatgaaggtggacagaatatggcggttttgcatgatgatcaagtagtcaaatttgaaaccactgtttcagaaagtgatgaaacggatctgtttatgcaaagtgcggactatattcgtcgtttgggcaacaatttcggaacgatacgcttttttgatcggttgagcaatcaactagattatcgtatttttgtagaagggtatccagtcttcagcagtggtgctcagggattgatgaaagtaactttttctaacagtgggcaattagggaatcgagagatggcaatcgaatctagtttaaatgcgatccaagtgccgattccttctgagaccgaggtggagctgccttcaagcttaaccgttcgcagtgacttgctttctgcaggggcagagacggatcagctgcagcagattattgttggctatcaatggggcgacatcaaaggggcttctgtcgtcgatttgacaccaacttggtatgtaaagtatgagaataactggttcaattatcaggaattaatggctaaattgacagaaacggggggagtttgattggatttcaagcgaatcgaatggatttttttcctagcgtttttggggttgaatgtctttttgttcaacatttacagtgaagcccgcagtgaacagcagaacgttttgcagtcaaatcagacgatcccgattgaacagcgactagcctcagaagacattaaatattcaggagaactttctgacgagtatttgagcgggtactatttaagcggtgaacaaaccgatttggctgctgctttgaaagaagcgcaaggggacaagcggttagtcgaggcgactactgtcaaaggacaacagttgactcatatttcctcgggtggtttctacattagtgatgatactcaggcagaaaagacggtcaatgaatacctgcagcgtaaagaccaggtactttatggagatgaataccattataggaaaaacttgtcgctgttggatcaagaatatccaaccattgttgctagccaatcctatgaaactattcccttcaatgatagctcaagtcggatcgatatgactttagcatcgtcagataaactgttgcagatcgctaagtatactcagacccacatttccaatatcaccccgctgcgggagaaaatgactctctattcagagaaagaagccgtcaacacgctttatttgaataataagttgcctagtcattctaagatattatggacagagctggcttacacaaggattttgattgttggtgatcggaatgtctacattccggcttggttcgttgctgtcaaagcagatgcggatgtaaatattcagatcgaaactgtcaatgcctttagtaatcgaatcattacaaacaatgcagtacaaaaagtagaaaatccatagaaaaataggtataatggaactcgttgaaagtaagagagaggaagacagaaacaatgatgaaggaaagtgcctttcaagtaagcattttagctagcggaagttcaggaaattcgttatatatcgagagcaacaaaaaacgaatcctagtggacgcaggactgagcggcaaaaagatcacttcattattggatgaagttggacgcaagccagaggatctagatgctattttggtcacccatgagcatcgcgaccatatccacggtgtaggggtcttggcgcgcaaatacaagttggatgtctacgcaaacacaaaaacatggcaagcaatggataatatggtaggcaatattgcggttgaacaaaaacatgtttttgaaatgggtaaagttttgacgatgggggatatggacatcgaaagttttggcgtttcccatgatgccgcagcaccacagttctatcggttccataaagatggcaaatcttttgtgatgttgaccgacacaggttattgcagcgatcatgttcgggggatcatcaaaggggccgatgcgtatcttgtcgaaagcaaccatgatttagaaatgctgcggatgggtccttatccttggagtctcaaacagcgcattcttggggatcgtgggcacctatccaatgaagatggggcactagtcatggcagatatattgacggataacacgaagcgagtttatctcgggcatttgagtaaagaaaacaacctaaaagagttagcccacctaactatgatcaatacgatgaaagaacatgacttaggtgtcggtgaggcctttgaggtttatgatacggatcccgataaagcgactgagttattcagtatttgaggatgagtggcgagcgtttttttgaagaaaacaacgatgatggaatgcggacagttttccaccaagccagagaatttatcttaagacaaaaaacgatgttgaaattttcaacatcgtttttttttgtgtcatggaaccttgatataaccggcgtgaaccaatagttgaatgataatgactagtgtattcattcccacgtgggtaatcatcgatgtccagatacgtcctgtcaacgcataaagtccagagaaaaagagtcccaatagaatatacaccaacaagtgattgtcactgtgtgcaaaggcaaaggcgacagcactgacaatgacacctatccaaatattcgaatagtttgcaatgattcccacaagggcacggcgaaatacaaattcttccatgataggtccgccaatcatagcggcaagggcaaaaatcgggttttgcagaataatagtgataatattctcagtattctgcgatgcagccacttcgccaaagagcgactcaataaagacagcgaagttttgcaaaagaatggcggcgatgattcctgttaggccataaacaataatagccgatacttttggctgcttgcgttcaaacgacagcggttcattttgtttaaaataaagaaaaatcatcaagattgcgccggcgatatacgaaacggttgtggcagggatcgtagcaccactagatataaaagcgacaggaataaaaaatgcgaccccataaatcaaaatcgtcgataatgcgtacttttttagagacataagtgaaatcatcacactcctttttttctattatagactagtgactcattagaaacaaaatttttccttaggtttttacggtatggagcaataaaaagaaaaagctaaaataaatttaatcaaaaggcttgcaaaaaaaacagaaaatgagtaatattaattttgtgagttagcactctatgtatgagagtgctaacggaaattctatcaaatacaattggagggatttatcgtgttaagaccattaggtgatcgcgtgattatcgaagtcgcaaaagaagaagaaaaaactgtgggaggtatcgtgcttgcttcagcagctaaagaaaaacctcaaacaggaaccgtcattgcagtcggtgaaggacgcacgctagaaaacggtgaaaaagctcctgttgctgtcaacgtgggcgaacaagtcatgttcgaaaaatacgctggcacagaagtgaaatttgaaggtaacgaatatttgatcgttgctgcaaaagacattattgcagtagttgaataaaaaataatttagttgaggtgaatgtaatcatggcaaaagaaatcaaatttgcagaagatgcacgtgcagcaatgttgcgtggggtagataaattagcagatacagtaaaagtaaccttaggccctaaaggtcgtaacgtcgttttagaaaaatcttatggttcaccattgatcacaaatgatggcgtaacgattgcaaaagaaatcgaactagatgatcatttcgaaaatatgggggcaaaacttgtttctgaagttgcttctaaaacaaatgacattgctggtgacggaacaacgacagcaacattgttaacacaagcgatcgttcgcgaaggactaaagaacgtgacagctggtgcgaatccattaggtattcgccgtgggatcgaaatggcaactaaagttgctgttgaagaactacacaacatttcttccatcgttgactcaaaagaagccattgcacaagttggtgctgtgtcttctggtagcgaacaagtcggaaaatacattgcagacgcgatggaaaaagtcggcaatgacggcgtaattaccatcgaagaatccaaagggatcgaaacagaattagatgtagtggaaggcatgcagtttgatcgcggttacctttcacaatacatggtcactgacaatgataaaatggaagctgctttagaaaatccatacatcttgatcacagacaaaaaaatctctaacatccaagacatcttgccattgttagaacaaatcttacaacaatcaaaaccattgttgatcatcgctgatgatgtcgacggtgaagcattaccaacacttgtattgaacaaaatccgcggtacattcaatgtcgtggcagtcaaagcaccaggctttggtgaccgtcgtaaagccatgttggaagacattgcgatcttgactggcggtactgttatcactgaagacttaggtttagaattgaaagatgcaacgatcgacaacctaggacaagcaagtaaagttgttgtggacaaagacaacacaacaatcgttgaaggtgctggcgacaaatcagcaatcgatgctcgtgtgcaattgatcaaaaatcaaattgctgatacaacatctgattttgaccgcgaaaaattacaagaacgcctagcgaaattagcaggcggtgtggcagtcatcaaagtgggtgcgccaactgaaacagaattaaaagaattgaaactacgcatcgaagacgcattgaacgctacgcgtgcagcagttgaagaaggaatggtatctggtgggggaactgcccttgtcaatgtcatcaacaaagtagcagccatcgaagcagacggcgatgcagcaaccggtgtgaaaatcgtcttgcgtgcgttagaagaaccagtacgtcaaatcgctgaaaatgctggctacgaaggatccgtgatcatcgacaaattgaaacacgcagatcttggcgttggtttcaatgcagcaactggcgaatgggtaaacatgcttgaagcaggaatcgttgacccaacgaaagtaacacgctctgcgttgcaaaatgccgcttctgtagccgcattattgttaacaactgaagcagtcgttgctgacaaaccagaacctgctgcaccagcagctccagcaatggatccatccatgggcatgggcggcatgatgtagttatactaaaagaaccccttagcaaggggttcttttctttatgcttctatttctatgatagaaaggagcaaataccaatggtccattgcttgctcattggtatattgaattccttatcattttggcattcaccgctaacatagctcaaaagagatactccatatttttacaccaaatagaaattaacttcatgttgaatgattcagtgaagaagtttatgatcaatctatcaaatctatttcattttcattctctttttgagacacccactcttcctacaagagtgggtatttttgcttaaaaagtagtccttttactcaaaatgaacgtgcgccttactagcttgatttttattctaactagcaaggagcagtttcatgtagcacttttttatcaagacagcggatagcgctgcatattttctgtctgtcctaaaatgtaatctactgacacatcataaaaggcagcaagatgcaaaatcgtcataacgtctggtagacgatcaccagcttcgtaatccaaatagtcttccaacgatacatcgatttgctgcgatacctctttttgcgtcaatgcttgcccttctcgcaaaaatttgaatcggcaacgcaatgtatccaataaaaaagcttcttctaatgtcaatttgcgttcctcctcgaatggaaaaatgattgatgacttctctctccatttctattgtaacaacattctagaaataagcgaaatgattcacaacatcagaaataaacaaggagaaaaaaagaaaacaaagtgcttgctctggtacgcgtttcatagattattctattcatgaaaggggcgtatgaagatgcacacttatatggaagtaaagggaaacaatggaatacaacgctgctatgttgcacttgaatttgatgggatgaacttgattctcacgaagcccaagggattttttagagaaaaggtcgcacaaataccgcttgcagaaattgggcacctggtacaggatgaatattttggtgcgcaacgaatcagtttcattcatcagaatgattattaccaattctatgaatgtggggcaagtgtgatagactatatgaaagaacaattatttgtctaaggagaagcgcatggcgaacattcgggatattgctaagctgaccggttattcggtctcaacgatttcacgagtcatcaataataatccttatgtggatgagcagaagcgtcaggagattttgcgggtaatggaacaagtcaactatatcccgaatcatacggcacgtgtgctaagctcgggaaaaacgaagaacatcggagtgattctcccatttgtcaatcatccgtattttgatatccttctaagcgggattactgcaagtgctttttcccgtgggtataaggtgactttgttgcctacccgctatgaaccagaaatggaagaaaagtacctgcaagaatttgcggcaaaagggtttgatgctctgattatcacatcaagagcaaatcccctcgaaaaactattgccctatcgtgcttatggccgcatcgttttttgtgaaaagatcgactctgtccaagatggatgcacctatatcgatcgtgaacaatccattcgggaagtgtttgcttatttgaaagaaaatggtatcgagcgtattggaattacacttggaagaagtcgtaagctgagcagcaattcgaagatcacagttcgtttgtgtcaggaatatttcccagcttttaccgaagaattgattttttgggattgtttgacggaagaagatgggcgagaggcagccgctttctttgctgataaaaatgtccaagcgatttttaccaatggggatcaggtagctgctggtatcaaattggcttcttcctccgaacgactacttattggcagagacaatttatttattagtgaagttcttcaattgtcaaccatcgactatcatttgcatgaatgtggagaaatggcgttgaagttagcaatccaagaagaacaagggtccatccggattccttatacgtttatcaaacgaagaggacttgagcacacataatgcggctcaagtcctttttatgggtcattaatctgcgtaatgagcgatgactgcctgtaaacagctggctgcgccttggcctgctttttgatcgtaatagtcagtaaaacgtgcatcatgaatgtacatttcacctaaactgcgatgataatcggcagaataaaatggcgctgcaagctgcagccattttttgtgcaactggaaggctgtttttgccaaagaagaagtcacgtcaaatggctcttgtaccacttgtttcaatgtttgaattagttcgttttcggtttgttccaattcttggtaggtttcaaatgacatgttctgccatttttgattgctttgttcaacgacttcttccccataagcggcacggatctcttcgccataggtttcttcattggctgcgagtttttgttgtttaaaataagtgaatttttctttatctgacatagtctgttctccttcataataattgattgtttgggctaatgttgtcaataagcgatcaagcgctgctcgttcctgagacaatcggttgtaatgagcaaccaacagtgtttgaacatcttgttcaggatcatctagcaaatgacggatttcttctagagggaggccaaaggatttaaagtacaaaatctgttgcagacgatccacttgctgtcccccataaatacgatagccggctgaattgatcctttgtggttttaataatccgatttgatcatagtagcgcaatgtacggctgctgacgccagaaattttagccagtgctgttatactatattccaaatttctccctccttatgctctcatcataaaggtttacgtaacgtcaatgtcaacaaaaaattttttgcttcgtcaaattatgttataattatagcaaagaaaggaagattcgatgcaaatagttttttccgatatagacgggacatttcaggaaatgggtcagcctgtccctgaaatcaataaaacagcgatcaactatctgaaagcacaaggcgatcattttgtttttgttactggtcgagggtatgatctggtagaagcactgatgatagaagaaggaatctcctgtgatgtcatctttggcaatggcgccggcttgaagttggaaggtcaggcgcctgttttagccaattgtttgccgctagctaccttagaagcggtgacagctattttagagaaagaaaatgttttttattttctgcacaccgatcaaggagtgatctgcaaagatcctgcggattatcaagaacaattgaccgcattgaccaataaattagttacagatctcggtgagagaggggcgatgattgctgaatacaagcaagcctattttgtgcatgactgcattcatgcaccggatcttttagcctacattcaggaacggccgacgatcaatgtcctaaagatcgaactgatggaagcatcggatgaaaagatcgaacagttgcgtctattgctgcagactgaaccagtcagtgcgtttcagtcatttgttcagacattggaagtcgttgatcccttagcaacaaaaggagccgcgatcacgaattttatgcaggctttccctcatgcaaagagttttgggatcggggatggtgagaatgacttagccatgtttgaagtggtagatgtctctgttgcagtagccaatgcgagtgaatcgatccgtaacgtttgcgatcgtatgattcctagtgcagctgacggcggagtcggccaatttatcatggatgaactaatacgagaggatgttgtatatgaaattgattgaaacaccagtcaaccaaaatttgaatttggagacattttatccggtcatctcaaaatttatttttgataaagtcgcgattaaatactacaaactttattctcttgatcgaacccagatcatgtatgtggatacttttgacaagatcacattggttttgatcaacaataaaaagaagatcagccgcggagaagtggatacagcgattcatcgcttactaaaagttgaccgcaaggatgtcaccgtagatgtcaatatccgtaaaaagatggaagcagcgggagtcaagtttgcgaaacctcgcaaagatatcatcctagttcaattagcagttgattaaccattagcagcctgtgttataagttgaagcaagacccaatgattcgagtgaaactggtggaataccccatcgcatcatgaagtttttcggtctttttctaacttatggcacagactttttttgaggaaaaaaacaagaaatactttctttttttatttttttgctataatagggagaagtaagtatgagggagcaaaacgatgcaaaaattatttaaagatgatagtttcactttgcatactgatctctatcagatcaatatgatgcaaacctattgggaattaggacgtgcggatttgaatgcagtcttcgagtgctatttccgtgacatgccctttgagaatggctatgctatctttgcagggttagaacgcttagtcgattatttgaacaatttgaccttttcagattcagatatcgattatttaagagaaatcggcggatatccggaggctttcttggattatctgaaagaattcaaatttgcctgcacggttcgttcagctttagaaggcgatctcgtcttcaacaatgagccgatcattcaagttgaaggacctttggcacaagctcaattgatcgaaacagccttattgaacatggttaatttccaaacattgattgcaacaaaagctgctcggatcaagtctgtgatcggagatgatcccttattagaatttgggtctcgtcgtgcgcaagaactggacgcagcgatttggggaactcgtgcggcttatatcggaggtgcgggtgccacaagtaatgttcgagcaggcaagatctttggcatccctgcaagcgggacgcatgctcattctcttgtgcaatcctatggcaatgattatgatgcctttatggcgtatgccaagacgcacaaagactgtgtctttttagtcgatacgtatgatacattgcgcttaggtgtaccaaatgcgattcgtgtcgcaaaagaactaggggatcaaatcaactttttaggagtacggatcgatagtggagacatggcttatatctccaaaaaagtccgagaacaactagatgaagctggctttacagaagctaagatctacgcatcaaatgatttggatgaaagcacgattctaagtctaaaaatgcaaaaagccaaaatcgatgtttggggtgtcggtacaaagttgatcaccgcctatgatcaaccggcattgggagccgtttataaactggtttcgatcgaaaacgaacaaggcgaaatgatcgatacgatcaaattatccggtaatgctgaaaaagtttctacaccaggcaagaaacaagtctggcgtatcacacgtaaaaaagacggcaagtctgaaggggattatgtgactctttgggacgaaaacccccaggaagaaaaagagttgttcatgttccatccggttcacacctttatcaataaaacagtgacagattttgatgctcgacctttgctgcaagacatttttgtagaaggacagcaagtctatcaattgccggatcttgaacacatcaaagcctatgctacaaattgtttggattcattatgggatgagtacaaacgagatttgaatccgcaaaaatacccagtcgatctctctcaagagtgctggaatcacaagatgcggaccattgaaaaagtgcgtacgcaaaccaaaacagaaattatttaattggtcctagaaagctaggaccaatcttcaaaaaaattaggaggcgtttctatgacattgcaacaagaaatcattcgcgagttaggcgtagttccaacaattgatgcgaaagcagagattcgtaatagcattgaatttttaaaagcatatcttcaaaaaaatccctttttgaaaactcttgttttagggatcagcggtggacaagattcaacactggctggtcgattggctcagttgacaatggaagaaatgcgcagtgagacgaatgatcccaattatcagttcattgcgatccgcttaccttatggagaacaggctgacgaagaagatgccaaaaaagccatcgaatttatcaaaccggacattacattacgagtgaatatcaaagcagccgtcgatgcgcaagtggcagccgtcgaagaagctggcttacctgtttctgattttaataaaggcaacatcaaggcacgtcagcggatgattactcaatatgccgttgcaggcgaaaaagctggcgctgttttaggaacagatcacgcggccgaaaacatcaccggtttctttacaaaatttggtgatggcggagctgacctcttgccgctatttcgtttgaataaacgtcaaggacgtcaattgttgcaagaattaggagcgccggaagcactgtacaaaaaggttcctactgctgatttggaagatggcaaaccaatgatcgctgacgaagtagcacttggtgtgacttatgatgagatcgatgattacttggaaggaaagaccgtttcaccaaatgcgcaacaaacgattgaaaattggtggcacaaaacacagcataaacggcatctgccaatatcaatctttgacgacttctggaaataaatcttttttactctgtgatagtttttggtccatcgcatctaggagaaaataaatatccgaacgatttatgaatgaattttttccgagaggcctcgctgtatcgctcaacgaggtcttctggatttcatagattgttcgggattttttgttttttttttatcttagtcataactctcttcaaggaagaatggcaagaataaaaaaacaaaacaagcaaacggctctttacattctaaatcgcaaagcataaaatacaggttatggttagaaaaggaggaatgtccttcgtgaaaagaaagattcatcccaagttgcagatggggctaaaactaatcggtagttttattttgattctctttagcaacctttatctacaatggtgtcaaaacaacctttctgttgagctagcattaaaatttgctttttcttggcacacagaaaagtttttcttagcttgtctggtgctgctgcttttctatgggttattgacaagtctggctggatcccttggagtcggggcgctgttttatagcattgtgatcgggatcttgggttatgcaaattacctcaagatggcttatcggcaagaaccaatctatccagatgatttgaaaatgatcactcagtttgatttgctgcatacgatgatcggaacaggccccttcgtcttggcgatgctatgtgtgatactcgcagtgggggcaattatctggagtatttatcgcagccgtaaattgtcaaaaaagaaacagatcctcagagggctgacaatgctcgtttgtacagttggtttagtttatgtttcgcattttaatgacagcaataatttgcttagaaaagcgtataaccggaccgcattatggatcccttattcacaaaaaatgaattactacaataccggttttattggtgggtttctattcaatctgcgggtcgatgcaatggaacaaccagcgggttattctgaagctgcgataaaagaaattgccaaaaaatataccgctgaagctggcgaaacaaacaaaacgcgtgaccaagaagcgccaaatatcgtttatgtcatgagcgaaagcttttctgatccgagccatctaaaaggactgacgattacaggggatcctttgaaggattattatgcggtagccgatcaaacgatcagtgggaaaatgttgtcgcaaaattatggtggcgggactgcaaacattgaatttgaagcattgaccagtttttcaatggggttgttgaatccgcaaatgaccacgccttacacgatgctggtccctaaattgacacaattgccttcagtggtctcattcttgcaaaaacaaggatatgatgcgactgcgatccacccctatgatacatcgatgtacaagcggaaagatgtctatgatgtgatgggttttcaaacctttttggatcaagacacgatgacttacacggacaagatcgagaacaatccttatatctcggatgcttctgcttataaagaagttctgtctcttttgtcagatgagaaaaagccgcaattcgttcacttggtgacgatgcagacccatatgccttatgaaggaaagtatcagacattaaattatcaagccacaggcgatggaaataggactgctcttgaaaactatctgcaagatatctcttacagtagtaccgcactaaaagactttattgaacaattgaagcagctgaatcgaagaacagtagtcgttttctggggggatcacctgccaggcatctactcggatgcgattaaagatcaaaatgatactgctgcgctgcatgaaacggaattcttgatggtggattctgatggaaccttttcaactgacactgttccggtaacgagtcccttttactttgcacctaacgtgttgaatgaaagtcagcaaccaatcaatggattttatgcgttgctgctagcactgcaagaaaaattgccggcttttgaacatgggcagtattaccaaggcgaacagtggcgaagtgagctaagcttagatgcgaaatcacggcagctctatgaagactatcagatgattcaatatgacattttacaaggaaaacaatatagtttacagacagatttatttggctaagaaaaattgtctaacataaaaaggctgtgacaaaagaaggatcaaggaagaaacacattgctcttattcagagtaggctggtttcttcgctaaatgtctttcttttgtcatagcctttatttattgagcaatcctagcgatgtgttttaagcagcatgtctctactaaggatcacagatttcttgtaggtcattatagatcttgccaagtccgttgctgattgaagtaagctgcttcattttcagcctgttcaacgattgatttcggataaccaagcactcgcagtagggcaatcgcattacggcttgttgaaggaccttgtttgaccttatagtcaaaagagataccgtcatcggctgtgacttgttcagaaaaatggatattgctgcagtcatttttcaatatttcagtcagttcaatatcatgagtcgcaataaaagccaaacttgtataacggctcaaccaatgaatgatactagcagaagcagcgatccgctcaatcgtattggttcccttcagtatctcatcgacaaagcaatagcagcgttctttttgctgaacttgttccaacaatcgtttgatcgacttgatttctgcaacaaaatagctatcgccctcaaacaaatcgtcttcgaccgccattgaggtcaacacatgaccaggttccatcgtaaaggattcagcaacagctgtttggatagtttgcgccaatagacaattgatagcgatgcttttgacataggtcgatttgccagaagcgtttgacccggttaccagtgtattggtttgccagtcgacatcattcatgacagcttcagtcagaaggggatgataggtcccttttgcgctgaccgttccttttttgaattcagggatacaagtgatcggcatataggtacggaaattaaggatcgcgcaagcaatttccaacttgcctaacaattcccataatgcgatcgcttgttgattgtatcgagccaataaggtaacgacgtaatggtacgagataaaaggcagcataaagatgatattgatgtattcaaaaagcatatcgccttcactgccattttttgaacgaaaagaaacgccgaatcgggggatttttttcagaggcagcagttcttttttgatttgctcttgtaatggtgtggcaagtttggcaatcttgttgccgcaggccactgtctgaactagatagcgcatactgttgagttctgtttctagtgtggcttttttgatcgaatagtaaaccgtattaaagaggacgcttatcaaaatcactgcaattcctggcaaaaagccaaaagctatcaaaatcagcccaacaatcggcaaacagcccaataaaataaagacaggcaagttgccaatactttctttcttccctgatgccagatagtttttggaaaagttattatccagtttcccaagttgggcaaaggtatattgggtatcttcgcgaatttttggattggctgcgaaaaaatcaattaacgcggtcagctgtcgatccggcttaaattgaaagttgcgcaactgctgatagagagcttcagaacctacactggagtaagtactgttgatcatttcaaaaacctcgaataagtctaagtcataccaagtaatgtcatcgatctcactatcatggggataaaaatctttctctaccatccaggcctttttgaggctttcttctttgtcaaagcgaggctgacgggggaattttccccattcttgtttgacgcgacgtcttaattttattcggttccaagtatctaagccaataataagtgcactaacgaacaagataatcaagataaccatatattttgcgtccatgtttttctccgtttctaggagcaaaagcaggatctagctcctgctccttctaagttaattgattttacgcaagacatcataaatgcgtgcgatgtcctgcgttgttcctcgcagttcaaaatcagctagaaatggaatctggaactgttcagcatattgtttggcagtcaggcagtattgataattgaaatttttgttgccgctgccgatcacaccgcgacaatagcgggcattatccgcataatcaatatactcccgcatggtttctgtcaaaatttcctgatccccattatctacgccgttgccgccttcaagataggtcggcacaaacacgacaaaaggttcgctttcttcttcgaaaatggaattgtcatcaatttctttgacggaccattctagaggatgcgctgttggctgctgggcagcatagtccattagtcgtttgacaaatgcccgggtatttcctgagattgaaatataaagtagtttcatgtcatcaccttccgtatccagtataacagaatcaaaataaaatagagcaggtcttttgtagccaaaggaaggaaaaataggtaaactaagtagatagaaaaggagtgagcatatgttttctgagatgcatcatgtggccattattgccagtgattaccaacgagcaaaatcattttatgtcgacaaattaggatttaaggtgatccgtgagcaccatcgtcccgaaaaaaacgataccaaaatcgatttggcttttggctcatctgagattgagttgtttatcgtggatcaaccacctaaacgagcaagttatccggaagcaaccggcttacgacacttggcttttcgagtaacaaacattgagaaaatggtagcagaacttgaaacaaaaggaattacgtgtgagccgattcgctttgacagctttacgaataaaaaaatgacattcttccaagacccagatgggttgccactggaactacacgaatagtatcgaggattcattcgaagcgcaacgacacttttttacttcggatgacaaaaaaatgctgttattctgaagaaaacacaaggaggagaaatcgtgattcgatttgcacaaaaagaagatcgttttgctatggcgaaacttgttttagtcattttaaaagatatggaattaccgtttgtggcagaaataggagaagaaaaaacgctcgagatcttggctgaagcgatgttagagcctgattatcgttatggttataccagaggattggtcaatgaaatcgatggacaagtggctggggttgcttttggttacccagataaagatgaacctaccattgatgaaccgttaacgaagattctggagtcctacggtttggataaagaaatgaaactgttcgttgatcaagaaacgttgcagaacgaatggtacttagataccatttgtgtcgatgaaaaattccgtggaaaaggggttggctcagctttattggctgcactgccaaaaattgcccaacgagatggctataccacaattggtttaagtgtcgataaagccaatccacacgccaaacgtctctatgaacgtcacggttttcaagtggttgctgaacgaaagatcagtggtcatctatatgatcatatgcaaaaagaaaccagttgagtatctcaactggtttcgttcgttaatcgtaactccaaatgttgctgggtcttgcgtttgcgattatagagccaataatccataatcgcagcaatacaaatgcaaactggcgcatcctcatcgttgaccacatcgatcacataataatcgccagtcaatagtgttgctttatccatttccatgatcttcttgttgaaatgatggatcgcataccgatgattgtagatatccccatggacagcccaatggagctgttggatataataaaaatccccaggccagttgaaaattttttgtaacgtacctactttttcaaagtccttgtagatctcaaatcgtgtgccaaaggtaaaactaatttgcttaatactggcgaccagtgtgccgtccaaacgatagagggaaagtgcatcgcctttagttccccagcgcccgaccatcaagaataacgatttgcccttttcgtctttaacgatcgttcgcgtgatactgctgagttgtctgtcttgaataaaaaattccgacatatctacgcctcctcttgtatcccgaaaagctgcgtcaattataaattctcatcgattgcccgaataattgctttgccgactcctgattcaatgttagtatccgtcagatacttcgcatattctttgacttcgatttccccgttacccatagcaaagctgacaccagcaagctgtatcatgctgacatcattcaagttgtcaccaatcgtcatgacatccgacagttgaatcgctcgctctttagcaacgtgtgccaccgcgatccctttttgggcattgcgatgattgatttcaatattgttttgtccggaagaagtaaccactaagtcgccataaccatcgatttcttgtgtgatcggtcctaaaacacgcgcgccatcttgatggaagcaaatgatttttaagatttccagatcttcaatcgcaaacagttcattgaagtctttgacataattgatgggaagaaaagctagtcgtgcagcagtcatggcaatggccattttgtgggtcagatggggcattgcttctgctgtatggatcgcaaaattctcgattcggcgcgtctggctttctgaataaatgccattgctcgtggaaatctcaaaataaatgtctttttctcttaataagtccatcaatgaacgggttttttctttagaaataggaacggtgaataaagaagttcctgatttgtcaaacacttgtgcaccattaagtgtgatcatagcacaatcaataccggcttcttgcaaaggcggcagagcttctttccggttgcgcccagtggccaccatgaattcgactccttgggattgggcatatttgatcgcttggatattttcttctgaaatctgcatgttggcgtttagtaaagtaccatccatatcagaagcgattaattttatcattgtcagcgtcctttcttatggtttctatagaatagtgtaccacaaatcagcaattatttttgagaatgtctccttgtttcttaggcagatcttttgttatccttaactaaaagcaaaggagcgagacgatgagaaagattttagaaaatgattggcaagaagttttgcaagcttccttcgatcaaacttattaccaacagttacgggaatttttgaaagtagaatatgcaacacagaagatccacccggcaatggaccatatttatgaagcactgaagctgactccgtatcatgaagtgaaagtagtgatcttaggacaagatccatatcatggtccgcatcaagcccatgggttatctttttcagtccaacccggagtacggattccgccttctttacgcaatatctataaggaattgcaaagtgatctaggcatcgcgccagtctctcacggttatttggttccttgggcgcaacaaggaattttactactaaatacggtgttgacagttcgtgaaggacaggcttattcgcatcgaggcaaaggatgggaacgattgacagatactatcatcgaaaagctgaatcaacgggataaaccagtgatctttgtattatggggaaaaccagcccagcaaaagaaagcgttgatcgatacgaaaaagcatatcatcatagaatctccccatccaagtccgttatctgccagtcgtggtttctttggatcgaaaccattttcaaaaatcaatcaagcattgatcgcattggatgaaacaccaattgactggcaattaccagaaaaaatagtacaggtgtgaaactgtagtagtgcagaagagacggactgtgaattgtgtaacaaaaattatctttttcgattagtacagcatttttatctgttcttttttttgcaactattgtacaatgtaagggtataaaaaaactggaggtctttacccgtggaactattcgaaagtttaaaatttaaaatcgtgcgtcgtcatatcaaaatcgttttcccagaagcaacagatcctcgtatccttggtgcagcaagccgtctacgttcagaagaattggtagaaccagttttgattggtaaccctgctgagattgagaaagcagcggaagctcgaggaatcaacatcgctaattttgagatcctagatcctgaaaactatgaccggtgggatgaaatggtcgaagcttttgttgagcgccgaaacggcaaagcaacaaaagagcaagccgaagaaatcttaaaagatgttaattattttggtacgatgttaacttacatggggatcactgaaggaatggtttcaggtgcgatccattcaacgggcgatacggttagacctgcattgcagatcattaaaacaaaaccaggcgtgagccgcacaagtggtgcctttttgatggttcgtggtcgtgatcaagaaaaatacctattttctgactgtgccatcaatgtgaacccttctgcccaagaattagcagagatcgctgttgattcagcaaaaacagcggaattatttgatatcgatccaaaagttgccatgcttagcttctcgacaaaaggttcagctaaagcaccagaagtcgataaagtggttgaagcaacaaaaattgcccaagaattggcgcctgagtacgaaatcgatggtgaattgcaattcgatgctgcttacatttcagctgtcgctcaattaaaagcaccagaatcagaagtagctggtaaagcaacggtctttgtcttcccagatttacaatctggaaacattggctacaaaatcgcacaacgcttcggtaacttcgaagcaattggaccaatcctgcaaggattgaacaaaccaatctcagacctttctcgcggatcaaacgaagaagacgtctacaaactatccatcatcacagcagcacaaacattgatggataaataagataactaatcaaacaaccaagccgttccttttgtcaaggaacggctttttgctgcgaatcacaacgattggcttgcatagcaagacagagttgatgatgagcagtactaggcgactaaagggagcgtagtaaccttcagcctgaatcactgcgattggcttgcgaagcagagagcagatgatgagcagcggggatcaaagaaagcgtagtaaccttcagcctgaatcactgcgattggcttgcgaagcagagagcagatgatgagcagcggggaccaaagaaagcgtagtaacctcagtatgaatcacaacgattgcccttagagtggcatggaagtctagttagcgcaacaagcttagaaacaattgcaggcaaagcaagatgaggggcgtcgcttccaaaaatactgcccacagcaggataaaaatggcttttctttcaaactccttgcgacggtacgctctttacttttgattctaaaacaagctatactaactactaacagcaagtgaaaagataaaggacggatcaaacatgataacgatcgctgatttagatgcaacagaaaaatttgccgaagtgattggcagagtggccctgcctggagacaatttggtgttaactggggaactgggagccggtaaaacgacgttgaccaaagggatcgctcgaggtctggggatcagtcaactgatcaaaagcccaacctatacgattattcgtgaatatactgaaggtcggttgccactctatcatatggatatttaccgggtagaatttggcgcatcagacttgggattagatgattattttgaaggtgatggtctttctgtgatcgagtggggaaatcttctggaagagtctttaccggaagattatttggaactgattttggaaaaagataatacagaagagcaaaaacgttttgtgaaattgcttacatttggtccgaaagctgaggctttccaacagcgtattttggcgcaatgggaggcagataatgagtgacattcatttgacattgcgtgaggctcggggcgaagatgcggcagaactcttggcagtcagtcaaaagattggtcaagaaactgactttttggtcatggatgaaacaggcctcgccctgcctgaagcaatgttggcacagcaactagaaagcttgtatgaacaagacaatcacctcctattgttagcccttgatggagaacgaattattggtatggcttctatcaaaggttattcggaatggcgcatggcccatgtaggagaaataggtctatcgattttaaaagactattggggaatgggactagggtcacttcttttagaagaattgcttgaatgggtcagtgaagtagggttgttgacacgcttggagttgacggtccaagcgcgcaatgaacgagctatccatttatatcagaagtacggatttgaaattgaaggttgtatgaaacaagccgcccaaacaaaagatgggcaacgaattgatgttctaatgatggcaaaattagttgatgaggagtgagaaggatgatcctgcttgttgaaccggccctagcagacaaagaacagttaacagcttatcgcgcatcatttttagaagacaatgaaactatccacggaggttctgggctagaaacagcggagacaatcgaaaaatggcttgaactgcaagaagcctacaaatcaccggcaactgttcctgctaatcatgtcattagtcgggtttatcttgcaaaacaagcagatacagtcatcggaatcttgaatctgcggctagagctcaacgactatttgctgcagcaaggcggtcatatcggttattctgtgaaaaaaacgtatcgccaaaaaggatatgggacagcaatgcttgctcaatccttgtcgattgccaaaagcttcggaatagaaaaagtactggtgacatgcgatgctcacaatcaagcatctgctaaggtcattgaaaaaaatggtggtcaattagaagatatatggatcgatccggtaaatgggaatagtactcgtcgttattggctttcaacaaataactgaaagacaaaagagtaagaaagtaagaagaaaagtaaaaaactgatactcattttacgagtaccagtttttttaatgggtcgatcccgaaatcgttttcttgacgtaataagatctgagcacaggcacgactatcttcaagggcgtcgtggtgattcagcaaaggaatctgcagctgttggcagacagtattcagcttgtgattctcgaattcaggatagagtttgcggcttgtacgtactgtacagagtgaaagataatttggctgttctatcccatagtaatcaagacatccagctaaaacgccagtatcgaaaccagcattgtgggcaacgatcagactgttgagattataatattgctggatttgtttccaaatgtcaggaaatttaggagcattgacgacgtcttccggatgaatgccatggatttggatatttttccaaaagaaatctgtctccggctggatcaacgtgtagtattctccaacaattttactgtcccgaaccatgactaatgccaatgaacaagcactgtgcttttgataattggctgtttcaaagtccattgcgataaaattcattgccttcacctcaaagctattctagcacaaatctttgaaatgaaaagatacaagatttttttggcaggatggccgataggacacagcgaaagaatatggtaagcaattagtttaactgcaattcgacggggcaatgatcactgcctaagatttctgtatggatttttgcatcaaccaggcggtcatttaaatcgtctgaaacaacgaagtaatcgatgcgccatccagcattatttttgcgcgcattaaaccggtaactccaccaagaataaatcccttcagcatcgggataaaagtagcggaaagtatccgtaaagcctgctgaaagtaaggttgaaaatttttcccgttcttcaggagtgaagccggcgtttttttggttggttttccagtttttaagatcaatgttttgatgagcgacgttcaagtcaccgcataggataactggtttttgctgtttcagatcggtcagataggcacgaaaagcatcttcccatgtcatgcgataatcgagacgacgcaattcattttgggcgtttggtgtatagcaagtgactaaaaagaattcggggtattccagggtgatcacccggccttcggcatcatgttcctcgatgccaatcccataatgggcagcaagtgccggttctttagcaaagatcgctgtaccagagtatcctttcttttctgcataattccagtattgcgtgtatcctggcagatccaactcgatctgccctgcttgcagcttcgtttcttgcaaacaaaagaagtctgcatcgaaggtctcaaaggcttctaaaaagttctttttgacgattgctcgtaagccattcacgttccaagaaataaatttcatatttgtcctcctcggttcaactatattttccattctaccgaaaaaaagtgtaagattaaagcaagacgtaacgtttaggaggaatcagtcatgaagatcggtgttatcgggttaggaaatattgcacaaaaagcatacttgccaagttatattgcattgcaggatcaagcggatttttattttgccacccggcgtgaatccgttcagaaagaattgcagcaacgttatcggttggcgcatatgtacaccaatttagacgagctgatcgatcagggaatcgaggcttgtttcattcatacagctactggcagccactatgagttgatcaaaaaatgtctgacagaaggaatccatgtctttgtcgataaaccggtcagcgagaattttgctgaagtagaagaattgtttgctctagctaaagcaaaacaaaagttgttgatggtcggcttcaatcgccgctttgccccgatggtcgatcaattaaaacaaattccggataagcggatgatttatctgtcaaaacaccggcaagctgctagtcatgataccaagtatgtgatctatgatctcttcttacatttggtggatactggtgtctatttattggatgaaccgatcatcgcgcatactagtcagatcaaagaatcagcggatggattggagacggccacactgatcttggaaacagcacatacaacggcgattttgacgatggatctcaagagtggtgccaatacggaagattaccggatcaccgccaaaagcggaacctatgatgtgaggaatttgactgctcttacggagtatgtggaggggaaaacggtggaacatgagtttggcgattgggaaacaacgttgaacaaacgagggttctatccattagtttcggcatttattgcagcagtcgccgatccaacagctatcgatctgcgccaagcgcaagtgatagacagtcaccagctttgccaagaaatgatcgctgccaatcatcgggcaaaaagtgattctttagagaagtagcaacttttcaatgaacatgctaaaataaggaagatgtttaatgtgaaaggactctttcttgtgaataaagaattaatgatcaagcaatttccagaaattgcgttactaaaagatgaagctttattgaattatacgtatacgaaaacaggagggcctgcagatatcctggcttttcccaaatcagcaaaagaagtagaacaaattgtcgcctattgtcgagaaactgatactccttggttggtcttaggcaatgctagcaacttgatcgttcgtgatggtgggattcgcggtgttgtgatcatgctatcagaaatgaatcagataacggtagaagataccactttgatcgtcgaagcaggcgcgaagctgatcgatacaacgtatgtggcactccatgaatcgttgacaggatttgagtttgcttgcgggattccaggaagcgtcgggggagcggtatttatgaatgccggtgcttatgatggtgagattcaagatatttttgcgtcctgtgatgtcttgctcgcagatggacgcgtcgtgactatgatgaaagaagagatggcgttttcttatcgccacagtacgcttcaagaccaacatgcgatcattctgtcggctcgttttgatttggcgcaaggggatcaagatcaaatcaagaaacgaatggatgagttgacggaactccgtcagctgaaacaaccattagaatatccttcttgcggcagtgtcttcaagcggcctgttggtcatttcactggcaagttgattcaagacgccggtttacaaggattgaaatggggcggcgcgcaaatttctgaaaagcatgctggcttcatcgtcaatgtcgatcatgctacagcgacggactatgtggaactgatcgctcatatccaacaagtgatcaaggagcgatttgatgtccagttagagacagaagtgcgtattatcggagaagaagcaaaataattcaacatgttcgtaattgtgacaacgtctgatgacaaatcgatatctgaagaatgaatgtattgcaaggcttcgtaaggcatcgttgcgatgtatcgagaacctatagcattacttgaatctttcagaacggttgtttatttggacagttgtcacattttttattaaaaaaggcaatgggaaggctgtactatttgtctacccattccgtcttggctacaataaagaaaaggggaaaatggagggatagtatgaaaaagtggttgggtattggcttgttggttgggctattctttttaaccggttgtacgaaattaccgcaggatcagtttgctgatgggttaacagtacaaaaagatatgaatgctggtgactttagcgtgacgatcgatacatttgaatttgctggcgaggacagccaaaattcacaagaaagcatgatcgcagggatgattttctcccagttggcgggaaccaagatcacaggaaattttgttgaagatccaaaaagcaaaaatattcgtttggatgcctcactgtcttctggagaaatcgatgttccactgaatcttttgatcgatggcaagagccatgacacctacctttcagcagaaatcgttgaggcaatgagcaatctgtttgcatttgatacattcggtacatcggatacatttgatagtagcgaaacgccagatacgacggggaaagataaatatattcgtctgtcaccagatgagatgtcagatcttgacacggaccagctattgaacaatagcttattttcttctgagacattggcagagtatgtcaaaacgttggatcgtgaatcttttaaaagagatggtgacaccatcacgcatacattcacaaaacaagagctgttggactttgttgactatgccaaaaaacaaaaggcagacactagtgagattacgcagtgggaagatctgctgaaagacagtgagcgtattgatttgactgtatctgtcaatgcaaagaaacaaaaccaaaaagttgtgatgaacatgacccaatctggcgagctgcctttggctattgggatcacgtttactatcagcggcaaacaaagtgatgaaaaagtccagttacctgcttcagaaaatgtcgttgatcagcaagagttttttgattcctaccaagaagactctttttgggatgacagttattacggcgatgatcccctctctgatgaagattggacaaattatacgctaacagacgaggagtttgaccaattattagagatggttgccactgatctacagggcatgacggatgaagaaatcgctgattttttgttgatttatgaagacttactgaccgaagaacagtaccagcgtttggctgaggcattgcaagtaagccaaaatttatgagcagcataaaggaacactaaaaaaagagccattgaagcaagcttatcaagctgcttcaatggctctttttatttgaagttctttcaaatgaatcaaaaacgtggctttttcgtcaatctcagtaatacagaagcaacagccatggtcgcaattcctgcaacgatcgcctctgggataccttgtgtcaaaataacgccaaggatggcggtatagacggcagttccggcattaccgatcgcagcggcatattcttgttggaataaaaagtagatgaggttcatcacgagaatcgtattcgtcaatcctccagcgattccagcaatcagcaacgaagtgctttgccgcttgttttgccacattttctggcaggctttaaagacaaaataagggacgattccgatcagaatgcgaggaatcagagcaaccaagatcgctttccaacttccatgatccatgccatagactgggacaaatggcgagaacacaaaagaaagcggcgagatgatccacgttgaacggaccatactaatgatgccaaaagcccctcccagaaagccgccgatccgtggtcctaaaatgatggaagcaatgatcacgggaatgtgcatcgtagtagcattgatcggacctaaaggaatgaaccctagaaaaggaacggatgctaaaagaatcaagatccccaggaaaaatgcagttaaaactaaatcaaaagtggctatttttttcatgttagactcctcgtacttccaatgctgcaacagcttgttcaacgatcgcttccacggtcgccagcgcgccgcggccgaaatccccgcaagccaacaaggcttcgcgaggagcgatctcttgataaccgacctctttcaaaatggctagatttcgttgcacgattggattttgatacatattggtattcatcgctggtgcaatcagttttggtacctccgcagtcaatgccaaagcgaccgttgagatcagatcatctgctaaaccatgagccaatttaccaatcaagttggcactggctggcgcgatcaagaaaaggtccgcttgcttcgctaattcgatatggttgatccggtcaggttggcgttcttgcatcacatccacatggattggtcgcttagataatgactggagagtcaatggtgtgatgaattgcgtactattagcagtcatcatcacgtcgactgcataccctcgttttgtcaactcattcgcgatatccgctgctttataagcggagatacttccgctaatacctaataatacatgtttttgtttcattttaattcctccttatccaaggggctcttcatttttcaataatgtatctacgatcaatgcggcaatttctagcttagtatggccggtaccgatttttttatcggcagttagtaagtgaccaatatgctgatcttctttgatcgtagtcaagtcattggccaagacataatctgcttgatttttagctagactatcacgggctacttgaaaaagtgtttcttccgaaacatcgactaataatttgaaacccaccaactttgtctgaggttgttttgctttgattcgctggatcactttaggtgttttctttaagaccatcactagatgatcagtattcgaagagagtttgcctgactgttccattgactgtgctactaatgtctctaacaactcaggagatacttggttgtcaaattgtggaagcagctgattgatcgctgtcaagaatgcttcttgtgaccaactgttatcaggtgtgaaatcactgaccgccatgctgtggatcactgcaaagtaagtatgtgccgataataaggactcaagacaattcagtaatccaagagtgccttcgatagagtggaccgtcaatcgtgaatcgttagctggctgttttgcttgacgagttgtgacataatcaatttcaatccctttttctaataacgcttcagcgatggctttgcctaatgaacctgttgaatgattcgtgatcgaccgtactgaatcaattttttcggaagttccgccggcagtgatcaatattctcatgtttctgatgccaccttgacgattgtccgaccttgatgggtaccggctaataaggatgcgagtgtttccggcaatgtttcaaaggtaatctcatgactatgcagctgatctgcgacataccagcctgttgctagacgttgccaaagttcgttacgagtggcagtgtcaacattgaccgagtcaataccgatcacgcggatgccgcgaagaataaagggtaaaaccgtcgtttcgatgttgatacccccagcatttccgcataaaaaggcaccgccgccgtaacggatttgcggcaataatgcggaaagaagggaaccaccgacggtatcaataactgccgctactgtctgcttcgccagcggtttgattttttctggttgccaatcagctggatcagtgattttggttgctcctagtgccaataaccagtctgcctcttttttacgagaaagtgcgacgatgtttgtatagcctaacttatgcaacaatgcgatgctgatacttccgacacctccggaagctccggtaatgacgatcggcgcttctttttcaagggcaagtttttcaagttcggtgacagccagtgccgcagtaaagccagcagtaccataacgcatactatctttagccgataaggtttctggtcgtttgatcagccaatcagccggtacccgttggtattggctgaagccaccgggatgagaaacacctaggccgtaacctgtcagcagtacttggtcgccggttgaaaaatccggactttgactttcaatgacttcaccagccaagtcgatgcctggtgtcatcggataagtacggataacaccgccattttctttagctgctaaagcatctttataattgacatcggaataagcgactttgacaagaacgtctccctcaggtaaatctgtcagtttgcaggtctttaaagtggcagtaaatgttggttcatttgttacgatataagacgaaaattctgtcattcaaggcaactcctttaatggtttgaactcatgataccataatctggttgatttttaatcattgttgcgaaacagatgattattcatgagacaatttcttcgttagaatgagagaagagcattgagagctactgaatgaaaacggctaaataaaggcattatgtgacagctgcccattggctgcagctcatttagtcaataagaaagcttcgaaaaattctcttcaaaaaaggtaaaaaaagacttgttttttttagaaaagtttgtatactggaaaaagtgaaattaaacttgaagtttactattagcaaacttttttgtgggaattttttactatatttttgatcgagggggaatgtagatggagattggcgagaagctccgcaatttgcgggtccaaaaaaatctgacacaagaagaattaggggaacgaaccgatttatccaaagggtacatctcccaattagaaagggatttaagttcaccttcaatggaaactttttttacgattttagaagtccttggagtgaccccggaagaatttttccgtcaagaaaatgcagaccatcaagtggtctatcgagaagaagacagtacgagttattatgatgaagaaaatggctatgaactgcggtggctgattccagactcgaatgaaaaagagatggagccagtcgtgttgacttttgagaaagccggcgagtataagacatttgaaccttctttagcggaaacatttatttatgttttggaaggaacgattgcactgagcctcggggaatcagaatacaaagcacgtaagggacagtccatttattaccaagcaacagaaccgcatcaattgagaaatatcggccggcaaaaaagtcgcgccttgatcgttgtaactgattcttatttatgatttagggggaaaaagtgtgggaaaaacaattatttcgttcaataacgtggtcaagcgatttgatgacgatgaaaccgtcttgaaaaatgttagttttgatattgaagaagggcgtttttatacgcttttaggtccttcaggatgtgggaaaaccacgatcttacggatcattgccggattttccgaagcaacagaaggcgatgtttactttgatggccagcgtatcaacgatgttccggcaaatcagcgacaagttaatactgtctttcaggactatgcgttgtttccacatatgaacgtgttcgagaatgtggcttttggcttacggatcaagaagctgccgaaagacgaagtcacaaagaaagtcaaagaagcattgcgattggtccaacttccaggttacgaaaatcgtgagatcagtgaaatgtccggtggacagcgtcaacgggtggcgattgcgcgagcgatcgtcaatgagccgaaagttttactcttagatgagcctttgtcagctttagacttgaaattacgaacagacatgcagtacgaattgcgggaactgcagcagcgattaggaattacctttatctttgtgacccacgatcaagaagaagcattagcgatgagtgatgagatcttcgtcatgaataaaggaaagatcattcaaagtgggacaccggtagacatttatgacgagccgatcaatcattttgtggcggactttgtcggcgaaagtaatatcgtgaatggcacgatgatcgatgataatttagtcgagtttgtcggcaaacgcttcgagtgcgtggatggcggtatgcgggcgaatgaacccgttgaaatcgtgatccgcccagaagatctaagtttgaccaccgctgagaaagggaaattgatcgttgaggtagacacgcaattgttccgcggcgtacattatgaaatcatttgttacgatgaacaaggcaatgaatggatggtccattcgactagaaaagccaaagaaggcagcaagatcggtttgttttttgagcctgaagacattcatgtcatgcgtttcaatgaatcagaagaagattttgatgctcgtttagagagctacgaagattaggagggagcacatgacgaaaatgcgtcgtttctatgcaataccctatgtcttttggttattgctatttgttatcgcaccagtattattgatcgtctatcagtcctttttcgatatggatgggaatttttcactggtcaattatcaaagttatttaggttccggcaagtatttgatcatgacattgaactccgtgtggtatgcctttttgatcacattgatcacgttggtcatcagttatcctacggcttactttttgacaaaactacgtcataaagacttatggttactgctgattattttacctacatgggtcaatttgctgttaaaagcctatgcctttattggtatttttggaattcatggcagcgtcaatcattttttggagatcacgggtgtcggaccaaaacagattttgttcaccgattttagctttttaacggtagcggtctatattgagctgccctttatgatcatgccgattttcaatgcactagaggagatgaatccttcattgattagtgcgagccgtgacttaggagcgaacagctatgagacttttcgccgggtcattctgcctttgtcattgaacggcgtcaaaagcggcgtacaagcagttttcattccttctctttcactcttcatgctgacacgtttgattggaggaaaccgtgtaatcacgttaggaactgcgattgagcagcatttccttgtgacacaaaactggggcatgggttcgacgatcggtgtgattttgattattgctatgttcttagtgatgctcctgacaggtgagaagaaaaaaggaggacaacgaaaatgaaaaaattccgctggtcaaatctttatcttgtcgttgtctttatcctattgtacgtcccaattttttatttgattttttattccttcaatgatggcggtacaatgaatgactttactgggtttacctttgaacattaccagtccgtctttcaagatacacgtctgatgatcattgtattgaatacctttatgctggcatttttatccgcccttttagcaacagtgatcggcacgttcggtgcgatggggatctactatacgaaaaaacggcgaacacgaacagcgttgttaagtttgaacaatgtcttactggtttctccagatgtcatcattggtgccagttttctgattttcttcacgatgatcggaaatttgttccgcggctttagcctaggtttttttagtgtgttactgtctcatgtggcctttagtattcccatcgttgttttgatggttttaccaaagctacaagaaatgaatgattccatgattgatgccgctcgtgacttaggtgccaataatctgcaagtcatcaagaacattattttgccgtttctgacaccgggagtcattgccggctatttcatggctttcacttattcactggatgattttgctgtgacgttctttgtaacagggaatggctttagcacactttctgtagaaatctattctcgtgcccgtcaggggatcagcctagaaatcaatgccttgagcacattggtctttttattctcaatgattctagtcgtagggtactactttatcagcaaagaaaatgtgtcgaaaaaactacgtaaaaatcggcgagcggaggtggcaaatctgcgatgaaaagattacaatctttgatcataggaattgtcgccatcattttggtactgctgtttggtgtacgggagttggaacattcttcaggaatggcgggcgccaaagttttgaatatctataactggggtgattatatcgatccagatcttttgaagaagtttgagaacgagaccggttataaggtcaattatgaaaccttcgattccaatgaagcgatgtttacgaaaattcagcaaggaggaacgtcctatgacattgccatcccaagtgaatatatgatccaaaaaatgatggaagagcacttgctgaaacctcttgatcacagcaagatcaaagggctagacaatattgatccccgctttttggatttaagttttgatcctgacaaccgctattcgatcccatatttttgggggactcttggtatcgtctataatgataaattttttgctgaaggtgaaatcaaggaatgggatgatctgtggaaaccagaactaaaagacagtatcatgctgatcgatggcgcgcgggaagtcatcggtctagggttaaacagtttggggtattcattgaacagcaaagacgacaaacagcttacagcagccttcaacaaattgcgcaaaatgacgccaaacatcaaagcaatcgtagcagacgaaatcaaaatgtatatggcaaacgaagaagcctctgtcgctgtgactttctcgggagaagcagccgatatgatgtatgagaatgaacatatccattatgtgatcccatccgaaggatccaatctttggtttgataatatggttattcccaaaacgtcaaaaaatgaagaaggggcctatgcatttttgaactttatgcttgaaccagaaaatgctgcccaaaatgctgagtatatcggttattccacaccaaacaaaaaagcactcgcgttattgccagatgaaatcacgcaagacaaacagttctatccttcagatgagctgatgaagcatttggaagtctatgaaaatctaggcgcccaatatttaggcatttataatgacctatttttggagttgaagatgtacaggagataatggtaaaactcagtaagaatggggatttatcaacgttctaaagagctaaaaatcgtcctttttctatctgagttttccaattttctaccaaaagcggctgaaaagccgctttttttgtgttattttattttttctaccacgtttttctaccagagatactttgctagaaaagctttgcgatagagatttttaccagacgatgttgaaaataaaaagacagaaacgcttgaccgtatataggcgttcatctatattgtatatagataattatctatatacaattcaataggaggtcctccatggaaaactatgaacagattgctaccatcatgaaagccttagctgatccaaaaaggctgaaaattgttgacttactttctacagctgactctctttgtgcatgtgaagtgttggagcattttgactttactcaaccgacattatcacaccacatgaagcttttagagaaggcaggaattgtcaaagtaacgaaaaaaagtcaatggcatcattacgctttacaggaagattttgttgaggatttcctagtaattttgaaggaacttcttatcaaagaaaaatcaattagctagtaaacgataggagtcttatgaatgaacaatgtatctacggaagtaactgaaaaacctgcaataaattttttcgagaagtatctaacagtttgggtattgttatgtatggcagcaggcatgctaatcggaaagtttttacctagtgtcgcagaccgattagaaagctatcaagtattaaatacaaatattccaattgccgttttaacttgggttatgattttcccaatgatgatgaaaatcgattttaaatcaatactgaacgtccgaaaaacatatcaggggattatgatctctagcattacaagctggctaattaagccgttcttgatgtttggcttagcctctttcttcttttatgttgtttttagcaattttatcccagcagacttagcaaaagactatgtggctggagcggttttgttaggggcagcgccatgtaccgctatggtatttgtttggtcaaaccttacaaaaggtgatccagcacataccttggttcaagtatcaattaacgatttattaatcattgtcctatttgtaccaattgtttcttttcttttaggagtaaataatgtgtttgtaccatggaatattctctttgcttctgtactactatttgtgctagtaccgttagttggtggggcattgacgagatacttcatgataaaacgtaagggaattgattactttaacaatcgcttcttaccaaagtttgactccattacaacgattggcttgttattgacattggtaatcatttttacttatcagggggatattattttaaacaatccgtttcacgttctcatgattgccgtgcctttagtcttacaaaatattattaccgcaaactttgcttattttacttgtaaatggacaaaacagcctcataatgtggcagctccagcagctttgattggtgcttcagacttttttgagttatcggttgccgtagcaattacgcttttcggtgtcaattcaccagttgtgctagtgacaacagttggtgttctgacagaagtgcctgttatgttgttattagtaaaattgatcaatggaacgaaagattggttcccgacaaaaggagaaaatgaatgaaaaaaatctatttcttatgtacgggcaattcctgtcgaagccaaatagcggaaggatttgctaaaaaatacttagatgattcttgggagattcgaagtgctggcgttgaaactcacggcttgaatcctagagcggtggctgtaatggaagaatctggaatcgatatttcgaatcaaacatctgacttgattgatttggactactttaatcagtccgataggattattactctttgcggtgacgcagcagataagtgtcccatgattccaaaggaaagcacacaccttcattgggatttagtagaccctgccaaagcgaaaggatctgaggcagaaattagaagtgcctttcgaaacacaagagatgaaatcaaaaagagaatgattgaattatcgcagcagttaaatgtgtaattcaaaaagggagcggggtaaggtatgtggacttggattagcgaccaattactaaaaatggtttggctaaatgatttgatggggaaattaattgagcgttttgggctttcgctagacagcaagataggggcaagtcttcagttctttctgtttgatacaattaagatttttattttattaacgatattaatttttgttatggggtacgttcagacttttttccacctgaaagaaccaaggtattgttgggtggattaaaggggtggaaaggcaatttactgggggcacttttgggaacagttacgcctttttgtagttgttctagcattccaatctttattgggtttacaaccgctggattaccgttaggagtaaccttctccttccttatttcctcacccatggttgatattgcgtcaattatcatgttaatgtctttttttggctggaaatttgcggtagcttatgttcttttaggattactgctagctgtaattggaggtacactcattgataaattacacctagagaatgaaattcaagattatattcgcgaaatggaggaaggtcttagccaagttgaaacctataccattaagaaaagaatggcttatggttgggggcaagtgaaagaggttgccagtaaagtctggctttatgtattaattggagttgggattggtgcgctcattcataattggattccaaccagttttattcaaagcattctaggtaataataatccatttggcctgattattgcgaccttaattggggtacctatttatgcagatatttttggtgttctcccgatagcagaagcgctattctcaaaaggggtgccagtgggaactttaatggctttcatgatgtctgtcacaacgttgtctttgccatcactaatcatgttaagtagagtggttaaacctaaactgttagggatctttatcacaatttgcattgtaggtattctattgattggctttattttcaatagtgtagctttataaaaagataaggggattagaaaattatggaaattaaaattgtaggttcagggtgtaaaaactgtcaaaaattaaaagaaaacgtggaaacagcagtatcagagttaggtatgacaccaacaattacaaaagtcgaagatatggctgaaatcgtgaaagctggtgtgatgaagactccagggttgattattgatgataaattagttgttagtggccgggttgcaaaaccaaaggaaattaaacagctattgcaagaagtttgaaagatatcatttatataaaaatcactggatgtttcgagatattcgaaagaagtacaaaataatactgtaaagacaaactccaggtcgggtttcgccacaagcgaatcacccgatctggagttttgtctattgcaggaaggcgtagccggactgcatgaataaagccaccggttctaacagggggctaacagggggctaacaaagaacaggaaactgtgacaactacccattggggagtgtcctagcagtattttctttgtcacgtgcttatcaatcttgtcaccttattttgatgatggatacgctgcgtttaacagacgttctttctcgacttccatcacgaatggcagataaagatattgttgttctagtagatattgattgtcctctgtgtactgataagaagctgtttcttttgaatagaccaacggggcaattcgcacatctccggttgattgattgatcgagtattgactgatacaagggaaggaagcaagtttcaaaaatatctttccccattgtgttttaaaatagttacagcttcctagcgacctgtagagagacagcaaaagtctttgtctacaggtttttttgtcttagaaaagagtcgctgagacaattggaagcagctgccctgcagaagaaatactaagcagtactaggtcgaaacaagaaatagtcccaaacaaagcgctatcctataaaaactaaaaatacaacgcgtcagttacagtaactttttttgaaaagggtcatgggtttatagccgtagtttttagaatgaatcagctaattcgaagataataatatggaatttttctagaaattatcgcatgaaatgacccttgattgagaacgccatgaaaggtgggagaaatgcagttgtgtatataagcgaaagctgtctcttctttccaaagaagactggatgattttggaatctgattttctttggcttaaagggcaaaatagtttgtttttttgggagattaaatttatactaatttttatagctaatttagtgacttgttaagtagatacgaaacaactcctgaattagaaaacaaatgaatgggaaagcgaatgtttgatgacagctatcattcgctttgctgaaccgtttgcctaaggagtggaatgttgtgccagatttagtaaagtttgtattggttatcttagttatttgggttatttatcaattggttacttctgttttatttagcttgtcgcaaaaagccgttaaaaaacgactgaagagtaataagatgacagatcaacaacttgtaaacttgtatcattctgttgcaaagtcaaatcaatataatacgatgcaagccatattttcttatggaattttttacaaaagtcatgaaaaacaaagtaatgaagtgtacaagttgtatcgagatgaaatggaaaaaagaaacttgctataaaagaaattttaaggtcacttatttttctgataagtaacatcaaacatagatatggctaaaaatagatccttctttgcaattttgtgaggagggctctatttttttgagcaaacaaaataaataggtgaataaaaagggactctttttttgatggaacatcgtctctgcgcttctactggtaatagtagtgtaacagtggaatttttaaagagtctagctagatatgcaatgctgcttatcaaagacaggatttcataaaaatctatgaatctagtttgtttaggggtattataaatatagcaacaaagtggataaacaatctggaggaggaagcatgattcaacaatttttgcaaaaatttacacgaaaaactgggaaagtagaacaatcatttgaagtagtatctaaagaacacagagaaataaaagggctttcttttgaacaaaacgaagatgaatcgatcgttatggactttttgaatcatatggacagagagtatgacacaacacctgcaggacggaaacagcaaggagatgcctttgagcaatttttggcagcggtctttcggctagcaaactacgatgttgagatcaccagaaaaagctatctgcaaggcaaacaggtctacactggtgatgacaatgtagacttgattttaagcaaagatgcggaacggattgctgttcaagccaaacattaccgcttgaacacgaaagcacccaacttgatcacgaaagagtttgtcaataaatattcaggaatctcagatgaaaattggacaaataaactttttatcacaacatctttatttaatccccatgtttatttagagatcgagaagaatgaaaaagcacaaaacattgaatggtatgacaggtacgggttattgcagttgttgaacacattgatcccagaaacaatggaaaagcacatgtttttaaatagtttgccagaacaagtagtcaaatgtccggaatgtgaatcagggtttattgtccaaaaatggaataagcaaaaacatagctatttcaaaggatgtacgatgtttccagagtgtgcacatacggaaagtgtttcattcaggcacacacgtaaaagttttactacgtcctcaaaagaactagataatagcatttcttcttaggataactggtactctaaaatgctcatttgttgaacgaatcagacacttagtagaagaaaggaatgaaaagatgtttaatctcgctgttcgtggccacgacttaaccaaggtttgtgatccacaagatctcgcttgtcaaatcgctgaaaaaggcatcaaaaatgttcaatttgcactaaatgcttcatttccggaacttagtgctgctgcccagatcaatccgggaatggggactttttttaaaaatgaatttgggcaacagaatgttcaagtggcattgttgagctgctatagtaatttgattcatccagatcctcatgaacgagaaaagattctgcagaaatttgaacgctatctttttcatgcacgctattttggggcgtcaatggttgcttcggaaacgggttccgttattcccacacttggttacagtgaagaaaattttacagatgaagtttttgatgagcttgtaactgttgtccagcggttggtaaaaaccggggaacgttatcaaacaatggttgggatcgaagcgggattaaatcaccccctattttccaatgaccgaattcaggaattgatcgcaagagttccttctgattttctgggcatcgtctatgaccctaccaatctcatcactccagaaacggcaagtaaacaagtagaaatcgttgcagaggcctttgagaagtttggtgaacgaattgtctgtctccacttgaaagactacgtgattgaagaggaccgcattgtttctgtccctttaggagaaggaatcattccttatcaagccattttacaaatcgttgaccaatacaaaccttattgctatgtcgtattggagggaacaaaagatgaaggaatcaaacgggcggttgctatgatagaggggctaagctgaatcgaatgaacccattggcaaaaaaatcatttgacgtcaaagaagtgattgcctctaatcgcgaacacatttagagagcacgcttatttaaaagaagcgacagcataagttagaatgggacaaacagacactagcgcataatcctgccaatattctgaattaacgctcaaaatatgcgatgaggatgtttgtgttctgtcccgttaaacgttaatctgtcgcttctttttttgttgggaatgatacgttctaattgaggctgttttattcgttgatctgccaatgacgaatcctatggatcagctgttctttctctttttcactggcaaaggaatggcgggcggcggtctcattcaataagcgcagctcactttccgacatttggcagtgacgggtcatgtgtatgtattcatcagttaatgttgttttagaaacggtgcgattatctgtgtttaagcaaaaagggaccccagctgtcagccattccctgaaaggatattggtgataatccgtgatggctttggtatgcacattactagtaggacaaccttcaatacagatttgattgcgggagacaaaatcttgggctttcttatcccctttcaaaatgataccgtggccaatgcgttttgcaccgctttcgattgcttgataaacattacggatacagccgcattcaccggcatgcaatgtcaattgcacgttttgaccgtctatgaaaagttggtaagtttgcgctaatttgggaacatagtcatcttcttcaggaccagctaaatcgatgccaacgactttctcttcagaaacagactccgaaaaaatctgggagattgcagcagcagactcttgccgcatcccgatgatcaagatattcccttttagcggatagatggactccgcacgagcgattcctctagctactgcttgaatcgtttgtgggcaggaaagaccctgttccattgactgactaggagcaaagcggatttcgatatacgcgacaccatcttcaaacgcttgttccatgacatcaaacgctgcggcttctaatgcaaattcactttggagataaggaagaacgaaatcaaagcgttccaagtactcattaagatcagaacagtcttggggggcttgcatccgttcttcaaggatcgacagttcttgtgggataggcagattttgctgattggcgatcttaagtaatgtttctggacgaatcgatccatccaaatggcagtgcaattctactttagggaaggcttggatttggcttttcgttaacacgtcattcctcctcgcatacgcagggtacgctgaatttttttatgtatgaatatagcatagatacgggttatgtgctagtgaaaaaaggaaattctcatgataaacactctccctctcaaaaaagcttctataaaaagccgctataaaaagcctctataaaaaagctccggtcaaaaaagctcgtatcaaaaaagccgctgccatgggaggattgtcccatggcagcgtacgattttgttgagttggcactttttttgctgagaaaactaaatcagctctgagagttcgacggcatcgatcgccagatcttgtgcggcttccttcaacgtgaagtgaccgtcaaatgcgatgacaccacgcgccagtgcagcgtttgttcttaatgccttttcaggatcggcagccaattgtttagcgtagggtaatgtggcgatactcaatgccaatgtagcagtctgtggaactgcgccaggcatattggcaacagcataatggatcacattttcttggatgtaggtaggatcgtcatgagtagtgacacgatcttctgtctcaaaaatgcctccttgatcaatcgcaatatctacaatcactgatttttctgccatggttttcaccatctcacgagttactagatttggcgcttttttgcctggcagcaagacggcgccaatcaccaagtctgcttgttgaatagtggcttcaatgttgaaacgattagagaagagtgtctgaacttgtccgtcaaatagctggtctaattcttgtaagcgtgggatggatacatcgagaattgtgacttgcgcaccaagccctaacgccattttcgcggcattggttccggcaacgccaccgccaataatcgtgacctgaccttttcgaacacccggaacaccggacaggaggactcctttgccgccatagattttttctaagaattgtgcgccgatctgaactgccattcgaccagcaatttcactcattggagagaggagaggcagcgccccattagccagttggacattctcatagccaatcgctcgaaccttggaggacatgagcgcttttgctaattctggattggcagcaacatgtaggtaagtaaataacagcaatcccgctcttaagtaggaatactcttctggcagcggttctttgactttcatcaccatgtcagccgcccagacgtctgcagcgttagcaacgatcgttgcgccgactgctcgataggcttcgtctgaaaaagttgatccgatacctgcatttgcttcaaccaagacctcgtgcccttcttgaaccaattcatagacgccagctggcggcaaagctacacgattttcattgttcttgatttctttaggaattccgattttcatatgcgtcacacctttctttcttctattataaaggaaaacggatccattgtaaggagaaagcgaagatttctcaaggtagccgtcaagaggcgcggtcattatcaacatgcattgatgaggactatttataaaaaaactacctatagagtgtcaagaaagaggtaatcgtgcttgatccttcctgacaacttataggtagtttcttttttataaattagtactttcgtcctctgtaaatgtccaaaaatgtaaactttgagcagcgatttcttccaatgaataggacgttaaataatgttttttttccggcgtatcgtttggatctaaaacaaccacattttcgtcttgcatagcagccaacaccatgatatgaccagtatctgtgaaatctccactggtcacagagacgatcactggctgtccaactgccagataattggctacttgcgctgtgtctgtgcccaaatcgtgatacgagtaaccaaaggaatccgcaaaatcagagaaaatccgccaatcggttccttgcccatcgacatagtagctatcttgtgcccaatccaaaacttcaagcggcgaaacattatcctctcgcaaataagcgagtaccattgaaagagagagcagggcacagccattatcgcttaaagtttgcgtaccatctgaaccataggaataatcagcccattcttcatttgtttgtaggtaaagaggcgtagtcacttcattttcttgtaaatactcgttcgcttgttcattgtaagctgcttgatcaaaatccatgtcatccatcatgggatattcttcataatcttggctggaatagctcacatgagaaagtcggataaatgcagcaaaaatcaataataaacccaacaaaacaagaaaaacataacgctttctttgtttcccttttttcttcatagcttccctcctgaagtagcgtgccttttttgccttacttcaagtaaagcagagggaatgaaggttgtcatccgcctgtggactgattcgtgtcagttgtttctagttcttccaattccagactcgtgttttcccaagcttccatcagctgttcttgggtggcttggacagtctccattgcttgattcagcgaagacaaacggacgtggtcgttcaatgcgtcaggacgagtcatcgcttgttcgatttcttcaagctctgcttcggttttggctaggtctgcttcaatttgagtgactttacgctgcaatgagcgaatggctttttgttgttctttgctctggaagaaagattgtttgccttgtgagatggctttctcttgaacatcagattgctgcatcgcagctagttctgtttcttccagttttttctccacgtaataatcatagtcccctaaatacaatttgctgccggtttcagataattcaatgactttggtcgcgattcgattgataaagtagcggtcatgagaaacaaaaagcaatgtgccttcataatcaatcaaggcattttcgagtacttctttgctgtcgatgtccaagtggttagtcggttcatctaagatcaggaagttgtcatgatccatcgcaagttttgctaaagcgacccgtgccttttcgccgccactgagcaatgtgattggtttttcaacatcttcaccagaaaaaaggaaacttcctaaaattgtgcggatctctacttctggcgtagtggggtgctcatcccataattctttcaagattgtttttgttgaatggagatctgattgggtttgatcataatacccaattgagacattggcacctagatgaacgtcaccgcgaatcaaaggaatcttgtggatcagtgattttaataatgtcgatttgccaattccattagggccgactaatgcaatggcatctttccggcgaacatccaaatcgatcggctcggatagaacagtctcttgataaccgatggctgcgttggctacttgcattaccacattgccagaaggtttactgattgaaaaaaggaaatttgcggatttttcatctccttgaggccgatcgagccgctccattttttctaattgtttgcgccggctttgcgcccgtttagttgtggaggcacgaactaaattacgcgctacaaaatcttctaatttattgatttcttcttgttgtttttcgaaagctttccattcactttgcagctgctcggctttcaaaaccagataacgactgtaattccctttgtaatggtgcattttccgtcggctaagctcatagacctcattgacgactttatctaagaaataacggtcatgagatacaatcaaaagagcaccggcatacccttgaagatagttttcaagccaagacaatgtctcaatatccaggtggttagtcggttcatccaaaatcaaaatatctggcttttgcaacagcatctttgctagtgctagacgagttttttgaccaccagacaatgtttcaatggattgctcataaaaagtgccgtcgaacttaaagccgtgtagaacagaacggatctcattttcatatccgtagccgtttttttcggcaaattcatgttgtagctggtcatattcttttaatagaccatcataattgactgctgtcgggtctgtttctgaaatggcgacttctaatgagcgcatccgctgttccatctgtcgaatgccggcaaaagccgtcaacatttcttcccagactgtagcagtactgtttaaaccagtgtcttgggcaagataacctagtgtcgcagttttatttttggcgatcgttcctttatcggggctttcgatcccggcaatgatttttaacagggtcgattttccggcgccatttcttcccacaagcgcgatccgggaatggctagcaatctctaggttgatattctcaaataaaacttcagcgccaaatagtctggcgatttgatttgcttgtaatagtatcatatgtattcattcctattcttgaagtcacttgtctccttggttgcaatactatcagtctatcacattttgtgataaacagcgattatgaaaaaagaatgattgtatcattaaataaaaaaaatttcaaattgtgagcaatcaaattgatttttgagcaaactatttgatatgatagctacatcacacgtgaatttttcacaatgggggagtatttcttgaaagatcatcaaattccaaaggcaacagcgaaacgtttgcctttgtattaccgctatttacgcatcttgcacaatgctggaaagttgaaggtttcatctactgaattaagcgaagctgtccaagtggatagcgcaacgattcgtcgcgacttctcttattttggggaattgggaaaacgcggctatggctatgacgtggaaagcctgatgcagttttttgctaaaacgttgaatgaagaccatatgacaaatgtcgcgctagtaggtgttggtaatctaggtagcgcactgttaaaatataaattccatcagagcaatagcattcggatcagtgctgcatttgatgtgaatgaagatatcgtaggacgaatcgtggatggcgttcctgtctatccaatgagcgatatgaaagaacaagtgaagatccaacagatcgatgtcgcgatcttgacggttcccgcacaacattcgcaagacttagtcaatgagcttgtgaaagcagggatcaaaggaatcttgaactttacgcctgcgcgcatcactgcaccaaaaggtgtgctgatccaaaatgttgatttgaccaatgaattacaaacactgatttatttcttgcattctggcaacgtcttaacgacagatcaaccggaaaaccacgaaacgactgaatcagaataaaacccaaaaacactgtcattccatcaaccttcgcgtctagtaggtgatggaaagacagtgtttttttattccatcagttgatcaaaaagatcgtcataagagatggtctcggttttggtcaaggcagtcctatagcgatcaataatagcagccagcctattaaaatcaatgattcgtgcttctctgtggcgttcatctccttgaaaataaagaaggacgacaggagcagtcaatgctgaaaattggccagccgcctctgggacttccgctacattgacagcataaagtggaacatgcttttctaaagctaatttattaagacgaggtttgtctgctaagcagacactgcaagccggctgtgagagataaataattgccaatggggtttcttttatcttcgtcagcagttcatctaatgtattcatttgtatcatgcaaattcctccaagcagattctctgtctaatgtacgttttgagggacaacttgtcaaagaaactgctggaaaagaataaaaactaaagcaagctttaaggtgccagcaaagactgtaaaaaacattgtgcattgaggcaaaaaaacgtatagtagttccagcgcaattatttttttataaagaaggttgaatatatgttacaaagcttacctaattctgttttgcagatgagcgtgatctttctctccatcgtcattgaagccttgccttttgtcttattaggctgcttgatttcaggggcgctgcaagtttttctgacgccagaacgagtgacaaaaatcctgccaaagaataaattggcctccattgcaatggggtgtggtttaggcgttttcttcccgtcttgtgaatgtggaatcgttccgatcgtcaatcaattcgtcaaaaaagacgtaccagtctacacggcttttgcttttatgctgacagcccctattgtgaatcccattgtaattttttcgacattcatcgcatttggcaattcagcgaagtttgcctttttgcgagtacttggcagcttgttggtggcaatggtggtaggtgtttggctggcttatttcagtaagagagagattttgaaaacccaattgatcacagcttcagaggatacccatcaaggacatcaccatgggcatgctcatgatacaggttctgagaaacgaaaatggtcccatcaaatacggcatttgttgcaacacagtattgatgaattcttcgatactggtcggtatttgatcattggcggattgattgcagcagcgatgcagacgtatttgccaacgggaatgatgttgactttgagttctacgaaattcttggcggtattggtcatgcttgttttggcattgacgatgtcgctgtgctctgaagcagatgcgtttatcggttcttcgctgcttagtctgttcggcgccggtccagtcgtgggttttctggtctttggtcctatggtggacatcaagaatcttctgatgatgaaacgatattttaccggtcgttttattgcaacaatggtgggattaattgctgttgtagtctcaatttatgcatgggtggtgtaaacaatgatccgttttttgattttatctggatattttgagttgatgatgtacttgcaggtatcaggaaaactgaatcagttcatcaatgtccactatcgttatctagcgattctttcgatgattgtcgctttatttttggcattagtccagttgtatttttgggtcaaacaaacgcctgatgaacatgaagatgagcatcaccatggactcgaaaaaaaatctcagcgcctcattgcgtatttcttattagcattgccaatcattgttggtttgtttttcccaacagtcagtctggatacgaccattgttgaagcaaaagggtttaatttcccgctgagtgaagagtctgtcggcgatcccgaaatgaatacccaataccttaaaccagatactagtctttattacaataaagatgattatgacgagcaaatgacgacttcgttagcgaagtatgccgataaacaaacgattgctgtcaccgacgagaattatttggaactcatggaattgatctatacgtatccaagtgaatttatcgggaaaaaaatcagctatgacggttttgtttatcatgcagcgcaagatgatcgtaatgaaatctttctgtttcgttttgggatcattcactgtgtagcggattcaggtgtttttggattacgtgttgagttacctgaacaaacggttaccgagaatgaccaatggctgcacattgaaggaaccatccagtcgcaatactatcaaccctttaaacgagatttgccaatggtagtcgttgaccaagaacaaaccatcgaggcaccggctaaccaatatgtttatcgatcattctagcgaaatgagagaaatatcggtttttttgaaaaagttcacaaaaatatcataaagctttgttataataaagataaactagtgcagatgtttgtagttttacaaaacgtcgagtacaatagaaacgtacaatgtgctaaaaaacaatataaagagaggtgtcgtgaaatgggttttacagatgaaacagtacggtttgattttgatgatagccgcaagaaagaaatcagtgaaacactggctatcgtgtatcgtgcattagaagaaaaaggttataatccaatcaatcaaatcgtcggttatctcctttctggcgacccggcttacattcctcgttatcgggatgcccggaacttgattcgtcgtcatgaacgcgatgagattttggaagttttgattcgttattacttaggaaatcacgggatcaacctataatgagagtcatgggtttagatgtcggttcacgaacagttggtgtagctgttagtgatcctatgggatggactgcgcaagggatcgagatcattcgaatcaacgaagatgaaaatgactttggctatgatcgtcttggagaattagtcaaagagtatgaagtgactcgttttgtggtgggactgcccaagaatatgaataacaccattggtccaagagcagaggcttcactagcttacggcaaggccatcgaagaacgttttgatttgcctgttgactaccaagacgaacgcttgacgactgttcaagcagaacgaatgctagttgaacaagccaacacatctcgtgccaaacgtaagaaagtcattgacaaattagcagcagtaatgattttgcagaattatttagatggtgctggaaaacaactgttttagtttacagaaaagaggaaaaaaaatgtcagaacatacgcatgatcacaatcatgatcacaaccacgaccatgaaggtcacgaacacattacattggtcgatgatcaaggcaatgaaacattatacgaaattcttttgacagtagatggacaagaagaatttggacgcaactacgtgttgctttatccagctggagtcccagaagaagaagatgtcgaattacaagcctatgcctacgttgaaaacgaagatggtacagaaggcgaattagaacaaattgaaacagaagctgaatgggacatgatcgaagaagtctttaacacattcatggctgaagaagaatctgaataaagaattgatggctgaacctttgatagtcaagggttcagcttttttatctaaaaaaccgtcagaaatgaaatagctcatttctgacggtttttttttgaattttaccacagccagttttacataaatcagttaactagaaaacaaagtttgtagtttttgatgatggacttctagaaggcgttgatataaatcagtttcgaaatcactgtaatggcaataatcaaggaccgtatatttaaaaggatctaggcccttcggaatcagcaaaggtgaccccaagatgataaagtcatattcttcagtgattggaagtgtcagctgttcgatagcaacaaatgggatctttttgcctaggtttaagatctcagcggaaatcagatgctcagaaacattgacaaaaccaactttcaacttatagttttcgtcgatttctgaataatacggataaagcaaacaagcttggatgaaagctaattcacttacacaagatttcagccacgtataatttttccgttgggaaaattttttccagaagccttcgattttgattgtcaagatatgtaagagtgggtacttttctttgatatacgaagaaataaacaatgtggtcaaagggttttttgtttgaacaagctaaagttaccaatcgataggtagatgttcaaatatagagctggctcattttcaaaatgaaacgtaccgataaacgtctgacaatggtcttggaattcgtccaaaatctccttggggtcattacttggttgctgataagaatgttggatgatcggcagacgaatgtcttggttggaagtcagaaacggccaataataaaacaaatagaacaaagagtttacctccaagaggtctaaacgcagattggcgatcttgaagaaatcgtaaaagaagttgaggtctgtaccacttggaatgaaagaatcccttgataagtgatagacatcagtaaagtggctgtttttgatcctcagcaaacaaatcagacaatggagactggcttgtttttttcctaagtcaaacttgttcttatgctgtgcttcttcatgtttataaatcaatgctctcacttcttggctataaggaactatgtccaaactttcacctaatgatacaaaccaaaagaaattaaaaaagaggatacgaatcaacatttcggaacctgacaaggtcagattcgataaattcaagttgatattgtattccttcaaatattcaaccagcttttttgtttgacgaaaacaggtcgagcgactgatatagtgccggttacaaaaagcagcgagatcgtcgtcctcttctattagcatactgagcaacaatttataaggaacactttcagttgaaaggtaatgttggtattggatgtattgaacaagttgttcattgacggttaacttatttttactatgtaatagcttgatggtagtaaatttttctaaatcatcttggattgcgctcaagatttttttgaagcgtgcagggccgtaataaaaatccaagttttcccgcacctgatctatgctgtattccccgggtgagagtgtcatcaacttgccgtagacactcaatttcgttctggcatgatcatctaacaaaattttttcaatcaattgatcaccttcctttttttgtaattattattattagcgtatttaacttctcttgtaaatacgtgtctcagatttctaacaagtctatacaaggtttagaaatatttctatttcacttgtctcaaaaatagcgttcagcgagtatgttttttgagagaaaagaaataacccacaattttaaataacgatatcaatattttttttgcttccttgttagtgtgtttaatggatataaataactataattgaatatttagaagctgaaggggaaagaattagaaatattagtgaatcttttctttttttttattatctatttgaattttaaaaaaatttcgaaggaggcactaaaaatgaaaaagggaaagcatcttgtccttcttagtttgttggccatctttttcatcgcttacttatattctcaacacataaacaaggtagtagcaaatgatgaagatgttgttgatgtagtagaggtgttgaaaaatgattatggagaagtgagtatcaagcaaacagatgatcatttgatcctcttttatcgcttaaatgagtcaacacaagaaagacgatttttatttcagctgcatcccaaggatgcagctgaaaacaatttccttacttcttacacttctcaggaataccaagaatatacagatgagaagcaacagaaatggataggcagtgatttttcgcagggaggtgtcgaaaaagaatggaatgtcgcattgccaaatactaataaagagtttcaactcaatattcagattgaagaaaaagcaggaaagttacttttatcagaagccgcttcttatccattctctatcgctaatgagaagaaagagccgtcaactacaagtgaagatatagcggaaacaacagcatcctctgaagtatatgatacatcagaggattcctcggtcatctcggacgagtatcatccgtttgatcagccgcaattgttcaacggacaggtgagttccgatggattaactacgatcgaaccagagtatgtaacggatgggcaaggtacttatccgaaagcgatgtggcaaccaaataataatcagtatgtacgaaatcaccaaggcaatcgtcagggaaaacaacaatgggatggagtgactaattgggatggtgatccaaccaatcaaaataattcttatattgaatatggtggggagaaagaagcagctgattatgcgatccgaaaatttgctaaagagacagcaactccaggtttgtttgatctgtatgtaaatgtccgaggtaacacgcaaaaggacattcttccacttgatatcgtattcgttgcagactggtctgggagtatgaatgaagaaaatcggatcattgaggtgaaaaatggcattgaccgatttattgatacattatcagatagtggcgtgacggaaaaaatcaacttagggtatgtcggattctcaagtgaaggatatagcaaccgtacgattccgctaaaagcctttgatagtgtaaaagaagaaatcaaagcagcaacccctctttcaacaagtggcggaacatttactcaaaatgggttacgacaggcaggagaattattatcagaacaaaatggacacaaaaaagtgatcgttctcttaaccgatggcgttccgacttgctcgtatcaagtatctagtgtaatggacgatgaagatggtagttattatggtacagcctttagcggacgtattgatcatccagactatacttcgaaaatctcccccccttatcttgcttcagtaagcaaccaatcttcgcaacggcgttggatcaattcgacatttattgctacgatcggtgaagcaatggcattgaagcaacgaggaatcgaaatccatgggttaggaatccaattacagggggatgaaaccgcaggactcacgaaagaagaagtcgagagtcgaatgcggaaaatggtctcgaatggggaggatgggacactgtattacgagtctgcaaatgattcctcagatattgctgattatttagccagaaaagctgtgcaattgtctgggaccgtcgttgatgggaaaatcactgatccgatcattgagccattcgtttatgaaacagaaagtgtttctgttaaaagtgtcggaacgagtcctttatctgttgaaccgattctagccattgaggattctatcattcgagtcgagcaaatctatttagaaaaaggccaagagatccaactgcattatcaagttagaatccaaacagaaagtaaaacattcgaaccagataggtggtatcagatgaatggttcgaccacctttcagccaacgtccaacccagatgtagttgctaaatttggtattccatcagcgaaagcgcccagtgtttctcttgatttcttcaaagaatgggaagaatttgatgaagatctgacaacgcgaccagaaaaagtgatctacgaaatcaagcgaagggggatcactcaatcatcaagttgggaaaatgcctatatacaattaaataagccggcaaaggacgaaacaaatcgttgggagcgaacaaaagtcaccaaagtttcagaatctagtgaagaaatcagagaaaccctttggctaccgaaatacaacaatctagggcaagatttccactatgaggcggtcaatgaagaagcggttcccggctatcaatcagaaaaaatcaatgcaacgacttggaaaaatacaaaacaatttgtccctttagacttaaaagtaaccaagaaatcttctgcaaatgatcatctcctaaaaggcgcggtattccaactaacgattgaggagcgggagattcagctgatcgatcatcaagatggtacgtattcgttgccagaagaaacacgtcttgaaaaaggaaaaaactatacattgacagaaatcagtccacccactggacacgaacgctcagaaaagcacatgtgggatatcgcgatttctaataatggcgcagtaacagtggacggtcaaaaaacagcagttgacgaccaagtcatccagttgacaatcgagaacacttttttagaccttccgatcgctataagaaagtatacagaaaaaggcaaagaaaaagtaaatttggcagacgcgacctttgcattacaaataaaagcggataaaggaagctatcaaacactgaaagaagccaccacagcggcatcaggattggcgcaatttaccatccaaaaatctggcaaataccgaatagtggaaaccgcaggaccgcttggctatgatacgattccaggaaattatgagtttgaagttgatccttatggaacgattgaatatgacgggaaaaatgtagaacatgcagcagtttggacgctgacacatagcaatcaaatcaaaccatttgatttaactgtcttaaagcaaacagacacaggtcaatcgttgaaaggcgcggcattccgactatctggttcagctgaacaaatcgaattaccaagtgatgaaacagcaatcgacacctttgtttttgaagatctcaaacccgggaattacacgctggaggagatcaaaacaccagaaggccatgtcgggctaaaggaaccagtgcaaattgttatccaagaggatggcaaagtgacaatagctggagaaccaacagaagtgcacttacaaagtgggaacaaaaacaaccaattgcaattagtggttaccaatcaggcgttgctctctctgccggagaccggcggcatgggaggacttggcatcattgctagtctcagcggcattgtttcatttgccatctattcgtttttgcgaagaaaaagggaaatcaatgagtaagcactattgattagaggattccttttttgttcattgttggttctgaaatggagtgaaaaaatggttttcttgatggcaaattgatcgtaggaaaattcattgtttattaaaagaataggagtaaagaaaatgaagaagagaaagcatatcaaacgattggtactatgttttatttcactagtaacattggcagcattgatttctatccagcacgtgtatgctgatggaactgaggtgcaactggtgatccacaagaagaaaatgttggattttccaagtcaagggatccaaaacacagggaaggaaatggcagagtttgatgactatcaaggactagctgacgtcaccttccatgtctacgatgcgaccgcagcatttactaaagcaagagaaaacggcgcaacgattgaagaagcgaaagcacaggtgcaatcacaaacttttagcacagctcttttttcaggcagtacggatactcatggggatctttctttatcattgcccaaaaaacaagcaggaaaagatgccgtctatgtgatcaaagaagcggcaaaaccaggggtgactgctgctgcaaatatggtcgtggcgtttcctgtgtatgaattgatcaaacaagcagacggtacgtatcaatatggagcagaagaactatcgatgattcatttgtatcctaaaaacattgttgaaaatgatggcacactgcaagtcacgaaaattggttccgctgagggtgaagcactgaacggtgcggaattcgtcattgtcaaacaagaatcagaggtaacaaaatatatacaaggcgttgcacaaggtatgtatacatggacgtcagacaaatcaaaggcgaaacactttgtcagcggcaatcgttatgaaataggagaagaggactttgtcgagagtgctgcggctaaaggacaaatgatcgtcgctggtttagaggtcggagagtatgtattggaggaagtcaaagcgcctgaaaatgctgagatgattgccgaccaaacaactacgctatttaccatcatttcaggaagtcaaatgcctgtagcaaagacggtaaaaaatgatacgactaaagtagaaaaagacacgccccaattagaaggacaagatgtagccatcggtgaagcaatcaactatgagatcaccgtcaatatacctgatgggattgccgataaagaggaggagagcaacaagtatacctcattcaaattgatcgatagccacgatcctgcattgacatttatgaatcagtccaagggagaaacaagctatgcactctatgatggtgaacgtctcattgatactaataattatcagatcactgaacatgccaatggttttacagtagcaattgcgcccacatatatcccttccctgactccaggtggaacgttgcgattcgtttattacatttatttgaatcaactagcagatccgacgaaaggttataaaaacgaagcaaatgtcgataatggtcacacgacagatcaaacaccaccgactgttgaggttctgacagggggaaaaagattcataaaagtagatggggcagtgattgagctacggccattggcaggtgcatcgtttgtcgtacgcgacgaaaattcggcgaccgcgaactatttgatcattgatccagtcacaaaagcagtggcgtggacgaattctccggagaaagcaacaactttcaatacaacgaacgatggattagtagacattacaggattagcttatggaacctactatttggaagaaaccaaagcaccgaatagctatatcaaattaaatgaacgaattgctttcaaagtagatgcacaatcttatgcggtggcgaatgaattggttactccagaaaaagtaccaaacaaacagaaaggaacattaccagcaactggcggcgagggagttactttgtatattggtttgggtgtcgttttattgacgatagtaggtgtctactggataaaaagatataaggcttagtgtcaaacgaagaacgaatggatagctgaggagaatgaaatgaagcaaaaaaaaaggcatcctttagatctaatcatgctattggtattttttatcggtatcctcagcttggcgtatccctttgttagcgatacattgaatgactatctcgatcaacaaatcatcaaaaactatcagaaaaaagcaaaatctgaacatgcgtcagtgattgctgagttgaacaagcagatgcgtgaagcaaatgaaaaaatggcatcaaatgaacctaagacagaagcagacccattttccaaggaaaaaaaggaaaagcagaactcgctgaaatcttatatagaagcacacacgataggtgttttgacgatcccaaaaatcaatgtcaatttaccaatctttgatcagacgacaacaaaactattggagaaaggggcctgtctgctcgagggaacttcatatccagtcggaggagtatcgacgcatgcggtactttctagtcaccgaggattaccacaagcaaaactctttacagatctacctcggttacagatagaggatcgcttttatatcgaaatcaatggtcaatatcttgcgtatcaaatcgatcaaatacaaactgtcgcgccgacaaaaacagaaacacttcagatccaagataaccaagacctggtcacactagttacttgcaccccttatatgatcaatagtcaccgtttgctggttcgcggacacagggtcgcagttgagcaagaggaaataagcgcgtcattgtcaaaagtgcagcaagcaaaacgaacgacctttttactcgtgactggtttgatcgttgtccttttgatgctgtctttggtgatggtgataaaacattttacaaaagttaaaaatacatgtagttttaaaaactagattcaaaagttttggtaatcagatagtttttcgagtataatggagtcgaagaaatgaaacggagtggatcaagatggagatagaatttagtcgaaagtatcaaatcatcaatgaagtattaaatgcagtgacccatgggatcgcagcgttgttaagtttgttttgctttaatttgctgatggatcgcgcccataccaccttagattatgtcgcttttgcgatttatggaagttcgctttttctgcttttcttttcctctacgttatttcatagcctgatttttacgaaggcaaagaaagttttccaagtattcgatcattgctcgatctatctcttgatcgctggtacgtataccccattttgcctcttagtcgtacagggaatggctgggttgatcttgcttagtgtcatttggaccaccgcagtaatagggattatttacaaatctttgaggttgacaaaaacgaacaaagtatcgaaagtttcaacgatcatctacaatgtgatggggtgggcaatcattgttgtcttacctaagctctatcagaatatcgatttgaccggattactactgttagttgctggaggaatcgcttattctgtaggctcgctcttttatagtatgaaaaatagacgattcacccatgtaatctggcatttgtttgtcatgttaggtgcagcattgatgttttttgcgatttacgtaagtaattaagacgttgtgcatgatgaaataagaatgaacaaattgttgggacataggttcgttacactctcaaaaaaatagaagcactcgaaaatggtttatttttcgagtgcttcttgtttgaaaagggaatgcgaggaaatcctttatgactaaagcaaaaacgtgccgagcaatttagctcagcacgtttttttaccttattcttctactattttagctgatgcaggcaagcagcggttgacggcaatcgcaacggccatcccaatgaaactatcgatcacccggttaaaggcataaagataggattcagtttggggaaccataaataaaatcgtcaaaagggtagcacaggcaccgaccgttccttcgtgatagtcgaatttcactaataatgcgatcatcagcatgataacgaaaggaatcgatagcagctgaacaaggtgtgtgtagccaaaaaatttaaaaattccgatacagatgatcgatgctaatgcgccaaaggtatttccagcaatccgatgccggccgtatttgacagtagtcccatgatcttctcttaaggtaaagacagcggtgatcgttgaaacaacgtatgtctcacgctgtagaagaaaacttagaagaatacaaatgaagacgctgatccccgtttttagatttcgcaaaccaaattttaatccgaatagattcaataatgccatcctttcataagaaatcatcttaaccctttcaaacgaatcatatcataccataagctgtatttgctagtgaaaaaaaagtccgaaaggttgctgcaaaggcttttctttgtgaaaaaccttcgtggctctcctggagaatacgtcaatcagcttgagagtgatcaaaaaagagtgaataccatcgttggagcgaatcagttgcttggctgaccaaacaagcgtaacataatattgtaaacgttatcttattggagagcagggatagggatggaaaaaatttatcaagcaagtacggcagaaggcgcagtcgattttatcaacatgcgtgatttagaagaggcagcaaaagaagtgattcccaaaggaggctatggctacatctctagcggtgcgggagataccttcacttatcgagaaaatgaacgcgcattcaatcataagctgattattcctcatgtcctcaaagacattgaattaccagacaccaggactaatttttccggtgatacattaaatgcaccgattatcatggctccggtggccgctcatggcttggccaatgtcaatgcggagaaagcctcggcaaaaggagttgcgcgcttcggtacaatttacacagctagttcttatgcttcctgtacgctagaagaaattcgggcagccggcggagaacaagcacctcagtggtttcaattctatatgagcaaagatgatggcatcaatcgggatattttggcgatggcgaaacgcaatggtgccaaagcgattgttttaacggcggatgccacagttggtggcaaccgagaaacggatcgccgtaacggctttacctttccattggctatgccaattgtgcaagcttatcagtctggaatcggacaaacaatggatgcggtatatggctcctccaaacaaaaactgagtcctcaagatgtggcgttcattgcgaaggaatctgacttacctgtttatgtcaaaggggttcaatcagaagaagatgtagcacgtgcgttagatgctggagcacaagggatttgggtctcaaatcatggtggccgtcagttagatggtggaccagctgcttttgattctttacagatcgtagcagatgccgtcgctggcagagttccgatcgtctttgacagcggtgttcgccgtgggcagcacgtctttaaagcaatcgcctctggtgctgatctagtggcgattggacgtccagtgatttacggattagcgttaggcggttcaacaggcgttcagcaagtgttcgatttcttcaaaaaagaattagagatggtaatgcaattagcagggactcaaacgattgcagatattcgccaagcgaaactacgggacaatcattatatataataaaaaatagtaataaaaagagccttcctctgccgcacgcagccagaaattcaaagaactgaaacctttgaaagccacggcagcggggctttttttatgacttttttgtatctgggttgattataggaaatcaccggtatcaagaacgaactgctacgatttatttgatagtaacagtgtatatgattttgaaaaggagagaaaaccctgtacacttaaattaacgaaatcaaaaaggagagggtaaaatgattccaaaaatcattcattattgctggtttgggggcaatgaattaggggaaagcgaacagaaatatatcgaaacctggcgcaaattttgcccagactatgagatcaaacgctgggatgaatcaacgatcgatctttcaaaatttggttcttacttacaagaagcctacaaacaagaagaatgggcctttgtttctgacgttgttcgtttgtatgcattagtgacagaaggcggcatttatatggataccgatgtcgaagtggtgaaaccattagatgatctattaaactatgaggcatttatgggatttgagatcgaaaccaaaatttccaccggtatcatcggtgcagtgcctcatcatcctttcatggaagaatggtatcatgactatgatgatcgtgaatttgtgcgagcagaaaaaacggaagatgtagtaaccaacgtcattcgagtcactgaattgttgcaggaatatggtctgcaactaaacaatcagcgtcaaacggttaaaggggtagaaattttcccgcaaatgactttctcgccaaaaagttatattaccggcgaagttgaggaagatccaactactatggtgatccaccaattttccggatcttggctataaacagttttttactgatccgatagttcgtcaagcagaatcccagcaacagttgaatgggcgcctgctgacgaactattttttattgtctttggcaatgaattatgccacaatagaacgaaatgaaatggatcggagtgagagtttatcatgggaattatccaatgtacaccggctgaccttgttgagttgaaagccatcagtattgagacgtatcaggacacatttgccccatataatacggaagaaaatatgcaagcttatttagaggctgcttatcattcagaaaagttgcacaaagaactgaaaaatccgcagtctgcttttttctttttgcaagaagaagcaattgctggttatctaaagcttaattggggaacagctcaaactgagccgattgcaccagagggacttgaagttgagcggatctacatccgaagtgactacaaacgccgcggctatggtcagcaattgttgtcttttgcggaagagtttgccaaggcaaaacaaaagacgtctttgtggttaggcgtatgggaacacaatgccaatgcattggctttttataacaagatgggctttcgacgagtaggcagtcattctttcttcatgggggatgatgaacagaccgattatttaatggaaaaacaaatatgaagagagtcactcttcttcgattcgttgttgttgaaaaatcaaagtcgaaaacctgtcgatgagagatgccattagtgacttcgaaagagggagcaagaggaggatgaaaattccttttcaattaatagagcttccagtatagtagtaaatgactaactaaaaaatgaaaattatggtgacagatgaaggagacaagaatgggacaacaaaaaactgaaagtgtattatcacgatttttaaaaggagtcgttattgctttaggatttattttgccgggggtctccggtggagttctagcagcaattttagggatctatgaacgaatgctgcgttttatggcacatttaacgaaaaacttcaaagaaaatctgctctttttcttgccagtagggatcggcgggatcgttgggatcgggcttttatcgaaaccgttagaatggctgctgcaaaattatcagattgtcgtcttatggggatttgccggagccattattggtacattgcctgcacttgcaaaagaatcgactcttaaaagcaaacgaactatgggggatttgttttggttctttggtacaatgatcatcggtttcttatttctttatttcatgggtgatattctaggaacgatcccagcaaactttttaggatttgttttggccggcggattgattgcattaggtgtgttggtgcctggattaagcccatctaacttattgctcgtattaggtttgtatgatccgatgttgaaaggcttcaaggggttcgacattttaggcgtcttcttgccgatcgcaattggtggtctactcgtgatgctgctgttctcaaaattgatggagtggctcttggagcattatcattcgaaagtctatcactttattttgggaattgtgattgcatcaacagtattaatcgtcttgccaccagtggctgattatagcggatttacttggctgactgcggtcagcggtgtgatactgtttgttttagggtactggttaggggcttggatgagtaaattagaagaaaaatataaataaccactgcgtggacaaaaaaacaatcggtcagatgatcgattgtttttttatggaatagaaaccgaggcaacctttgtctgaatagcgacgttcacacgtactatcctcactcccccttggaagataatcatgaaacgtcgctggaaaaaggggacaggatcgaacgggacaacttacatctgatcgctaagcgcccaaatttaaaaaaggatatatatataaaagaggtatcggacgatcctgcccaatacctttgtcatagtgaaataagcagaccaaagcgtgttgatttacctaaaaagaggtagaaatcacccagaaaattgggtacaataaacacgttgatgtactgcattgactatggcaaacttgatggtcagttgctgctgacaaatcaaggccctattccttagttgccgctaagggatggggtgccttttttggtttctattcgcttttattttatagaaagcgagggtataaatcaagggaacgtttccatatttaatgaaaaaatgcaagtgttttattagaaaaacgtgaaaagataacagaattctgtgagatttgtcaataaaagtcaatatttatttattgatatgagaaagactgaaaaaataaattttttcctgggagagccaagccatcaaagtgatgatttggctcttttttgtcgcttttttaaggggggcacttacgagtcctttattgtgttaggcgcaaaagtttaccaacttaacatgaacttttcataacgcttactggatgttaacgattgcttgataggatggagtaaatgagtaatgaggtgaaaagatgaatcatgataggctaaaggtacttattgaaaagagactgccccatatccctgcaagggattgtaaacgaaacacctccaaaagcaaacggattttggatcctcaaaaaagtatccggttccaacgtggacttgctaagaaaaagatgctaaatgggctagctataatagtaattaggaaatggcttttgagaatcagcaaagaccgacagatgggggtgacaagctatgtccattaaatcgcaaataaccgaaaagctgcttttactggttttggatggctgccgatacgataccgcggttgaacagatggggatcttgaatcatcatgtggattataaacaagcacaactgatcaaagtccatgctgaaatgcctagcagttctcggccattgtatgaagtgttggctactggtgtaccaagctaccggaatgggattctgaccaatgctgatggtcaacattccaaagaactctcgatttttgatcttgtcaaagctgccggcggaagtactgcagctgcagcacattattggcaaagtgaattattcaatcaagcaccttatgaaatcaaacgagatcgtattcaacacgaccacaaaaaaagtatccaacatggaatcttttatagtgaaaaccagtatcccgattcacatgtgtttgcagatggacattatttactgcacacgtatcagccgaatttgttactgatacattccatgaatatcgatgccgcgggacatcgttatacggctgtttcaaaagaataccgaaaagccgtaaaccaagcagaccaattgattggcctgtatttgcacgattggttggctgcaggttatcaagtgattgttactgcggaccacgggatggatgaatatgggttgcatggcggaagcatggctgctcatcgcgaagtccccctctatattttttcagatatttttccgccagactgtgggatcgaaaaaatgaatcaattagagttggcaccactgatttgcagtttattaaaaatcgatacttctgaacgcatgcagattgggcgcagctgatttgtagaaacgaacaaagccgctaaagtcaggtgctcaaattagggcatcattgctagaggtctatttggtttggcttaacgggcataaatagatggcttatatcagatgaataagcaaaaaagtaatcgattgttgttccgctacagagaactgtgccatgagtgaaaataaacggacattgtaaatgagagaaagtggctgccgcgtcttggaaactgtgagagtgcctaggtactatagcagcagttgcgatcgttagaatttattgggttttgtttagatccggtcgttccgtctgtttgttgactgtttatgggaccgtcttttttaattagaacaaggcaacgaagtgctgctattctttgcacttttagacaaacgactttatttgtctaaatctgtgaaaaatagcggttgttatttttgtcacaaatagaagatactgctaccatggatttgtaccaatattaggaggggatcatatgagatatacaaacggaaattatgaagcttttgcaagaagcagaaaaccgaaagatgtcgaaaagaaacaggcctatattgttggtggcggattagctggattagcagcagcagtctttttgattcgtgacggacacatggagggaaagaaaatccatgtgctggaggagctgtctctttcaggcggctcactcgacggcaaatttattcctcatgatggctttgtcactcgaggcggccgtgaaatggaaaatcattttgaatgtttatgggatttattccgttcgattccatcattggaggtagaagatgcctccgtcttagatgaattttattggttggatcatgacgatccaaactcatccaattgtcggatcattcatgatcgtggccaacgagcagcagatgacggagaattcactttatcagcagcagcccaaaaagagttggtccaactatttatgacttcagaagatcagcttgttggcaaacggatcgaggatgtttttggagacgagttctttgaatcaaacttttggctttattggtgtacgatgtttgcttttgaaaaatggcattctgccatcgaaatgcgtagatatgttttaagattcattcaccatatcgatggattgcctgatttcacggctttgaaatttactcgttacaatcaatatgaatcgttagttaaaccattattagcttaccttgatgcacaaggtgtcgatttccaatatgaaaccaaagtcatgaatattgacgtgaagatcactgaaggagagaaaatcgcccaaagtatcacactgatgaaaaatggcaaagcccaagaaatcactttgacagcagatgatctggtgtttgtaacaaacggctcaatcacggagagttcgactgaaggggatcaccatacacctgcccctattactcatgaattaggtggcagttggaatctttggaagaacttggctgctcaatctcctgaatttggtcgcccagaagtcttttatgacaatctgccagcagaaagctggtttgtatcagcgacagtcacatggcaaaactttgatattgaaccttatatttctcgtttgacaaaacggaaattacggacaggaagagtagtgaccggtgggatcgtcactatcaaagattcaaattggctgatgagttttgcgacccatcgtcaacctcatttcaaagagcaaggcgatcaacaaacggtgacttgggtttatggtctattgtctaatacaccaggaaattatatcaaaaaaccgattgaacactgttccggacaagaaatcgttcaagaactattgtatcacttaggtgttccagaagatgaaattctacggatctctaatgaatcatgttcagcgatccctgtgtatatgcctttcatcacttcttacttcatgttgcgggaacctggagatcgtccgcttgtgataccgaatggttcacgaaacttagccttcatcggcaactttgccgaaacgcaacgtgataccgtctttacgactgaatattctgtacgaacggcgatggaagctgtctaccaattgttagctattgaacgaggcgttccagaagtctttgcttccgcctatgatctgcgtacattggccaatgcgatttactatttatcggacaagaaaaaattgactgagatggagctgccatttatcgaacgcaaattagtagaaggatttgttaagaagacgaaagatacctatatcggcgaaatccttgaaaaaaatcatttagtttaacacacttgaatgctgtgacatccgttacttaaagacaggatacccgaaagaaccagagaggccattaaacggcctctcttttcttcgaggttacgtatgtctgacggatggcactgtttttttgggaacgatttccatgctgtagacccccctgtgtgatgtacacaagagtagcgaaaaataagggaaccgctatcaaacaaattgcttctttttaataatacagagtgttattctgttatatttctattgaactttttcactctgtttggtatattggttgttaattaaaagctttttttgcttttagtacagaagctataattgttacgatgaaaggcgggagatttatggaagatgcgacctattgggcagagcaattaacgcagaagaaaatcagtttttcggaattgacagctaggatcgaagaaaaaattcagcaagttgagccaacgttaaatgcgcttgtttcttttgatcggcaagcagcaattaagcagtatgaacaaaatccgcaaacaaaagcggctttattcagcgggctgccaataccacttaaaatattgggtcaaagtaaagcggggtggccggccacatcggcggctgcattgtttgcaaatgcaaaagcagagcagacgagtgcatttgtcaacgggctggaacagctaggattgattcctttgggacaaaccaatgctccggaatttggtttcaaaaatgttaccgatccagtattgtacggtccaacacgcaatccgtggcagtccgcctattcggcagggggatccagcggtggagcggcggccgtcgtagcggctggactatttccattagctgctgctagtgatggaggcggttccattcgtatcccagcttctttcaacggactaattgggttaaaaccgacgcgaggaactatgccagtgggacctcaagaatggcgtagttggcaaggtgcttcgatcaattttgcattgacgctttctatgagagatacggaacgtttgttttatggattacgaacgtctcaaccggcggctccctatcaggcacctagaatcgaatggaaacatcatggacccagtcagaatcgaacactgagagttgcgtacacaaccgagtctccagccgggagtccagtttcacaaactgctgtcttagctgtcaagaaagctgtcgcatttttggaagatcaaggacatcaggttacagaaatccgttatcctgttgacggtcaaacgatgatggcaagctattatcgtatgaatggtggagagacagcagcaatgtttgccgagatcgaggcaatgctgcaacgaccagtggaacagaaagatatggagctgatgacttgggggctgtaccaatatggcaaaaaattagcggctgccgattatatccaggcattgcaatattgggatcagctggcagtaacgatggaagctttgtttgcagattatgagttgtttttgacccctgcaacagcacaaacggcgccattgattgaagaggatttgcaaagtgatacgattcgaagcgaactgcaagagatagaaagacgaacagctgctgctgccggagacttgatttatcagatgttcgacaaaagtttggcactgacgccctatacgcaattggccaatctaacgggccaacctgcaatcagccttccaacagctgttagtgaggaaggtttgccattgggaattcagtttatggcatcaaaaggccgtgaagatttactttttcaagtgggtgaattgtttgaacgatgggagcaatttcatttacccaaaaaataactgtcgatgaatgacggttcaagaatgattttctagggggataaagatggaaacaatcaaaataaacaagtggaaaaatatcgttgtactaggtgcctttgtgatgttgttaggtgcttgcggaagtaaggctaaagaggacaatagtttaagtcgtgttcaagagtcaaaagaattgactgttgctacgtcaggtacgttatttccttcctcttattacaatgatgacaatcaattagttggctatgacgtagacgttgcaaaagaagtagccaagcggatgggtgtttcgatccagttcaaagaatacaatgtagacggacaagtggcgtccttgactagaggtgaagcggactttgccgcaaatgatttcggtctcagcggagaccgtggagataagtttcgtctgtctgaaccaatcaagtattcatttgatagtatgatcgtgcgaaaaagcgatgattctggcattgcctctctagatgatttagcaggcaaaaaagcagcgggagaacccaatacaagctacatgaagttagccgaagaatatggtgcgaaacttgtgacctatgataatgccacgaatgaccagtatctgacagatgtggcaaacggacggaccgatgtgatccttaatgattattatctgcaaaagatgtcggtggcagctttgccagatattccagttaaaatcttggaagatgtctacttcaatccgaacgaaacaggctttctttttgcgaaagacaaccaagcactgcatgacgaagtcgatcgtgttttaaaagagatgaaagcagacgggacgttaaaagaaatttccgaaaaatacttccaaacagatgtatctgtaccatctgacaaagagatccaaaaggttgaaaagtaatgtatatcccaactcttgatcttccactgatgtgggagtcgcttccttttttactgacagggttatcctatacgttagggattgccattgcttcttttctcgcaggaaatgcgttaggtttattgctgacttttctggggatgcttcaaaacccttgggtaagaaggatcgttcgaggctatatctcctttctgcgaggagtacccgcattggtgctgttgtttttgctctatttcggattgccgtatcaattacccgcattgacagctgccattatttgttttagtttgactagcagtgcttttattggagaaatttatcgaggatcgatcgccggagtggatcgcgggcaatgggatgcagcgtatgctctgggattgagtttttctaaaacattacggttgatcattctgcctcaggcatttcgcatatcggtcccagcattaagcaatgtcgcgatggacctgttgaaaggaacctcgttagcggcaatgatcacgatcccggacatttttcaaaaagccaaaattgttggcggccggacgtttgattatatgtcgatgtacgtgttagtggcgatcatttactggttgctgtgtatcgggatcgaagcgctccaacatcgcttaggaaaaacgatttgctgaccgctttgaaagtcaaaaaggctgatcgtcaaaaaagctgatcgtcaaaaaagtagctaaaaaaattcgctggttggattatttatgaatcaatctctttgtttgtggtacactttacaaaaaaggagtttggacaatgaaatatgaatggcgaaaacaagaaaaagcttactatttaccaaaagaaccacagctgatcgaagtgcctgcttatcaattcattacgttgactggcgaaggaaaccctaaccgtcctgaattttccgagcaaatcagtgcactttatatgatggcctatggattgcgcatgggattgaaaaaaggctccttcggcaatacgccttttgagtatacggtatacccgctagaaggcgtatggactttacctgaaaaaccacaaggaccgattgctaaagaagagttgatctataaaatcatgattcggcaaccggaacaagtaactgctgatttagccgccgaacagttgacacaaatcatgaagaaaaaagaaaatcgttttttggaacgaattcgtttcgaagaataccaagaaggctggtccgtgcaagcttgtcacatcggtccttttgacacagaaacagaaacgtttgcgaaaatgcaagactattgcgaagcccacgatctatcaattgttcccacgatgggcaattatcagcatcgggagatctatctgtcagatccgcgaaagacagcaccagaaaaagcaaaaacagtcttacgctggcgggtagccaaaacaaacaaagaatccgcttgatccatttaaccgttggtgtacttaatgaaaacacgtaatgaaaagagagagaaccgcgcttaagcgattctctctcttttactactcatcttttaagtagtcttcactggtgaattcactgtgaaaatacttgccttcgtcgccgtaataggtattgtaccgttgcttgaatttgcggaatccatacaccactaatacttttaagagacagtagatcggtattccgaaaatgacacctacgatccccatcaaatcccccataactaataaaacaacgagaatcgtgatcggatggatctgcagacgatctcccattacacgaggaacgaccaagtcaccatgaagcagctgtacggcgaaccaagcaatcaggaatttgatcagcattcctgttgaatcttgtgctgcgatgaaaagggccgggaagaagacgataaatggaccgatatatggaatgatacataaaattccggcagcgatcgccaagatacttgcatattctaaaccaatcagcaaaaaaatcacccaataaattccgcctaaaataaaggaagaaataatctgtcctttcagaaaggcaccaacttgtaggtcagcgatctttacgatcgtgttgaaatctttacgaaatcgcggtggtacgattgacaggagagaataataaaacttgtttggatttcttagtaagaaaaaagcaatgatcggacctgtaaacaatgcgataaacaacgttgagatcgtcgaaaagatactgctaagccctgcagcaccggtttgccaatagtcaccaatgaaatccatgatattgttggcaactttttgaagagtatccgtgatctgatcgatctgagcaccaaatggcgtattcgctaggaatgagtcagcgtttcgctcgaaatcagcaatcaaatctgggaattgattgatcaaatcggttgtttgtttttggatgattggataaagctgaaacccagccaaaacgatcactaaaagaatcagaagatagatcccgccaatggaaacaatgcggggaatctttttcgtttctaagcgatcaactaacggattgaacaaataatacaagatcaggccgaataaaaatggtggaataagagtagaaataatgacaaaaaaaggatcaaaaagaaacgagatttgtttaagtaaaaaagcagcgatcgcacagagaatgatcaatcccagtacataatagctggtttttcctcctaaaaattggattaaacggttttttttcatagaagagcctcactttcttagcctcattataacgaaagcagcactttctgtaaaaaaagagcgagtcaaaccaattttattttttacttttgcttatttgattcgtttatagatatgtaagggcgccacttacgaagcaatcaaaatacaatagaggaggaaaagaagcgatgaagaccaaaaccaccacaaggctgacgattcgaatccaagcaccagatgcagaaaaaactgtcagtcagaccgtcaatcaagtcatgaatgctccagaggaggctaagatgttagcgtttggtgaagccatggcaggattttctaagaatgcgtctttggctggcgtggtagaaacgatccagaatgagtacgtaaaataacgaaaggagagaaagcgatgaaaaagcttcatgcattatttttaactagcgaggccaaaaaacacacattgcagccaaaagtttttgatgaagagataacggcagaagcagcacgaacagcaatggagaatattacaaaaatcggtatctttgaatcagatggtgtccgttattacaatgagctgtctggcgccaaaatcgtagagacgattgagacgccattgttttgaaataagttgaagtagaacgttcatcaagaaatgctcgacaatcaaaagggactgtgccataagtcagtatccaacaagttaaaccgaataatagtctgttgctagcatagattcctctgacttttgcgacgaggagtccctgcaccgcaggagcaataatcattaatgttcggctagtgttacttgtaggagacttatggcacagtccctttatttggtgacggcagttaatgtacaacgtccgacagccgttttcgtgccatcggattgtctgatcgtagcttgccaagtttggatctttccaccgattcgatcagggacagcttccacagtaacagttccttgtttgaccgcttttaaatgattgacttgtagatcaatcgcggcggcaaattggtcttcagctacggcttgatttgcccccagactacaagctgtttcaatcaagacggcattgataccaccgtgcagaagaccaaaaggttgtttatgctgatcggtgaccactaaagataaccgaacctgagtagcggttgtttcttcgatctggatgcctaaatagtcaagtaagttcatagagttcctcgttttctgagaatttgatgatttgattataacaaacgtttgacagaaagcaatttctaacgaaattcgctcagaaatgtgtataatggaaacatgtgacataaggaggaacctgtaatgagagaatggaaaaccttaaaagaatacgatgaaattttatttgaacagcatggtaaagtggcgaagatcacgatcaatcgtccagaagtccacaatgcctttacaccgaaaacggtgtttgaaatgatcgatgctttttcaatcagtcgcgatgaacctggcattggtgtgatcattctaacaggagctggcgacaaagctttttgttctggcggcgaccaaaaagttcgcggacatggcggctatgttggtgaagatcaagttcctcgtctcaatgtgctggacttgcaacgtttgatccggacattaccaaaaccggtgatcgctatggtcaaaggttggtctattggaggcggaaacgtgctgcagctggtttgtgatctaacgatcgcggcagataatgcgaaatttggtcaaacaggaccgaatgtcggcagtttcgatggtggctacggttcaggctatcttgctcgaacgattggccacaagaaagccaaagaagtttggtttatgacgaaacagtatacagcagaagaagctttagcaatgaactggatcaatacagtcgttcctcttgatcaagtggaagatgtgacgatggaatgggcagaaacgatgctgcaaaaaagcccattggctttgcgcatgatcaaagcctcaatgaatgccgatacagatgggctagccggaatccaacaacttgctggcgatgcgaccttattgtattacacaatggatgaagcaaaagaaggccgcgatgcgtttaaagaaaaacgtcagcctaatttcgaccaattccctaaattcccttaatgaatggtagttggctgcaacggcaagcacaacttcatccagaacgaccagctttttattggcaagataaaagctggtcgtttgctgccttgcaaaaagaagtcacggcttatgcttgctattatgaacatcggattcctcaaacaatcgagcgagtagcgattttaagcaataactctcctgagatgtatttcacgattttggcactttgggaattaggaaaacaaattcagttcttaaacactcgattgactgaaaaagagctgtactatcaattaaccgatgctgcctgtcagtgggtagtcaccaatcgatcgctttccttgccgagaatcaagttcctgccttttggcaaattgcaagaacgttttttttctgcgccgatttcgatttaccaaaaaacacaagttgcatcgatcatgtacacttctggcacgacgggtaatcccaaaggagtgcctcaaacatttggcaatcattttgccagtgcacaagccacgcagatcaacttgtcggtgactgctgacgactgctggtgttgtgtcgttccgttgtatcatattagcggtttatcaattttgttgcgttccttgattttagggatcagtgttcgattatatgatcgattcgatgcgcagcaaatcgcatcagacctagctgctggtaaaggaacggtgctctcgttagtgaccaaaatgctgatcgatcttttgcctttgactggagacaatggttacccttcattgcgctatattcttttaggtggtggtccgattgccagatcagtcttgatgcaatgccaagacaagtgcttatcagttattcaatcctatgggatgactgaaacttgttcgcaagtcgttgctttgcctccagataaagccgaggaaaaaattggttctgctggattaccattagcccaagtcaatttgcggattcagtcgcagtctttgaaagaatctgttatcgaaaaagaaggaaaactgggggaaatccagttgcaaggacctgcgatcgttacgtgctatttgaatgatcgcgggttggagcagtggacgcaggatggctggtttgccaccggtgatcttggctatttggattctgaagggtatttgtatgtggtatctcgtttgagcgaattgattatttccggtggcgaaaatatttatccagctgaagttgaacaggcattagttagccaccctgcaattgaagaagcggcagtggtgggcgagccaagtggagtgtggggacaagagccagttgcttatcttacactcaaagagccgattacattaccagaattgatcgcctatctaaccccacagcttgctcggtacaaacacccccgtcgctattatcaagtaaaagaaatgccgcgtaccgctagcgggaaaatagtaaagcgtgtattgctgacagaagaaagagtgaactacattgaacagcaaatcaaagaatgagtatcaacatgcattagctgctggcaaaaaggtgtttagtcattattacccacttgcaccttgtgattttgttcagttatatgctgctgccagtcaatttattggtgaacgttatttttggcgatcatcagatcaagcaacctgttttttgggtatcggcagtgtgaaacggtacgcgaacccatcattgattgattttgagcggcagcgtcgaaaccttaaaaagcagcattttcaaccaaatacggaccaaatggctgctacattattaggggcttttgcttttgatgaacaaagccaaggagcagcagaatggggcacaatcggcaatggtctttttgtgttgccgaaaattctttttagaaaaataaatgatgtgtatggtgtgatcttgaccgtcgaagcgaaggatacgaatgacgtggaaacgctgttcggacagtttgctgatttacaacaactcgttgagcaatggggaaagcaagcacaacagcctgtaggggcttgtttgttgcagcaaacagaattagacgtaccacaatgggtaaaagcggtcgatgagacagtcgctgcgatccgctctgcaaaaacgcctttggagaaggttgttttagctcggcgaatgaaaatcactactaagaaggagattgattcctttgcggtgttggcccgtcttgcagagcaacaaaccaatacctatctctttgcttttgaagacgaggtttcgtttattggtgccacaccggagcgcttgttaaaggcgactgccagtcatttcgagacagtcagcattgcagggtctgcgcctcgaggcagcacaccagcagaagatcagcaaatagctgatgcattattaactgatcccaaaaatacccatgagcatcaagtagttgtcaatcgtctggagcaggcgttgtcttccttattggcggaagggttccattcagaggcgcgatcgatcatcaagaatcgcgacattcagcacttattcgtgcctttgtctggcaagcggaagcccgctgtttcttttttagaagcagtggctaagctgcatccaacaccagccctaggtggggagccaaaagctgatgcgctggcatggattcgtaaccacgaacctgcgcgtcggggattatatggtggaccaatcgggtggataggtatccaagaagatatcggagaatttgcagtagcgattcgttctggtgtttttcatgggacagaaggcatcctttacgcaggatgcgggatcgtcgccgattctgttgcagaagaagagcgccaagagacagccttgaaattccaacctatgctaagaggagtgatagagaatgaatcagcaagtcatgactgactacttgttggcagcaatccatgggtttaaagccgctggaataaagcgagcggtgatcagtcccggatcgcggtcgacaccgttggcattgcttttgcatcgggatccagaaatcacttgttggatcgatgtcgatgaacgttcagcagctttttttgcgttgggaatgaccaaagtcgatttgcagccgacacttttactatgtacatcaggtactgctgcagccaattactatccagcaatttgtgaggcggaagccacaaattttccattgatcgtcttaactgctgatcggccaccggaactacgtggtgttggtgcaccgcaagccatggatcagcaaagtctgtatgcttctcatgtaaaaaaaatggtagaaatgactgtgccggagaatacacccaacatactgaagtacagcttttggcaggctgccacgacaacgatcgaagcattaaagcagccacgtggtcccgtacacctgaattttcctttgcgggaaccattactgcctgacttcacgcggacttgttcgatccaacaaaatatcgcttacctccctacacagcaatcgctacctgcagctgtattgacagaactggcaccattgtttatgaaaaaagggctcctagtggtaggtgaaagtttgacaccttctgaagcagaaacgctgcatgcgcttgccaatcatcttggctggcctctagtgggggatccactgacaaatttggccacttgcggggaaacgtcggctcattttctcccacaggctgatttgatttttccacaactagatgcggactttattcccgaagtcgttattcgttttggtcgcttgccagtgaccaaaaatgtcttgctttggttaagcggtctgccggaaggcatcgactggcttttcgtggatgaatctggacagtggcaagatcaattgcatcgctcagcctttttgctacagcttacgatagaggattttgtggagcaagtaagcaagttgcctagcagaccacaaccagaatggtttcagccatggcaaaagctgcaagccgtcgctgaggaagcattggcaacgactcattctttaacggagtggaatgaaactgctgctgtacggatcttgcaacaaacattgggacatgatgcccaattgctcttagcaaatagtaatgcgatccgctttgttgatcgatacggaacggttacaggtagtgcttaccaagtatttggcaatcgcggtgtgaatggtatcgatgggttgatatcgaccgttgctgggatcgcagctgccagccaaaaaccgacctatttattgattggcgatctagctttctttcatgatatgaatgggctgcaattgctcaaacaatatcagctgccagtcacgatcattttactgaataataacggtggggggattttttccttcttatcgcaaaataccttgtcagaaagtgactttgtgccgctatttggcaccccgttggatcttgactttcagcaagctgcaaaactttatggcgcgaaatggcacgctccagcaactttgactgattttgcctcccaaatcgagcaatcattaacgacgccttgttttcagatcattgaagtagttggcctgcaaaaagatcctgtgatcgcttggcaagcgttgcaacaggagtttcaggaaaggatctccaatgaaaataaacgttaacggtgtgaactatttgtatcagtggtatcgaccttatctggctgatctgccgaccctcgtagttctgcacggatttactggcacttcagattcttttcgcccagtgtttgctcaagaaacgtccttcaatgtcttagcaatcgatttgttgggtcatggtggttccgccagtcatgtgcacccgttacgctatgagatgattcagatggtaacggatctggcagaattggtggatcgtttaacggttgaccgttattatctttatggctattcaatgggtgctcgtacggcattggcatggacggttgccttcccagacaagatcgctggcttgatcatggagagcggctctccgggactggaatcagaatctgcccgcagtcttcgccgacgcaatgatcaacgtttggcgatacgattgattcagcaaccgctggttgactttgttgattattggcaagaactgccattgtttgctagtcaaaaacgattaccaaaggaaatacagcagcaagtacgagcgacgcgtttgagccaacaggcgtttggtttggcgatgagtttgtactatagcggaacaggaacacaacctagcttctggcaaaatttggcagacattcagtgcccatttctggttctcactggagaatgggatgaaaaatttttcctgatcgctaaaaaaatgcagcagcaacaaccagcgttgactatcctctcggtgtcaaaagccggtcattgcgtgcatttggaatgtccagatgtagtggcaaatgaagtgcatgcttggttgaccgcacactgatattggaaaaggagagcgcgtatgaaaatcgtcaaagcagaacggattgcttgtcgactcccattgaggcagccttttgagacgagttatggtcgcttgacggaaaaagcatttgacctgcttgtactgaccgaccaagacggaaccgtaggtgttggagaattggtggcttttcagcaaccagattatattgaagaaacgttggcttcagctcgagaagtcattagcaagttcttattcccattgctgacaggaaacatcgatcatccgcgagatgtttggacgttatttcaaacagttcaaggaaattttatggccaaatcagcagttgaaacggcgatttgggatttatatggccgccaaaaacattgcagtctgacctctttttatccaacaacaagagacaagcttgctgtaggggtcagtgtggggattcaagcatccacagaacagctagtcgcacaagtcgctgattatgtagcgcaaggatatcagcgagtaaaaatcaaaatcaagccgggagtcgacttagagccgttgacagccgttcgggaaacctttcccgagctattgctgatggctgatgcgaacggcgcttatgaagatcaaccggaaaagattctcgcattagatgaattggggctggcaatgatcgagcaaccgttgaagatccgggatctagtggggcatcgccgtctgcagaagcagttaaagacgccgctatgtttagatgaagatatacgtactgcagaagatgtcgctgttgttgcctcattagatagttgccgagcaatcaatctaaaaattccgcgagtgggaggaatcaccgaagcgatgcgaattgtttcagcctgccaacattatggattggatgtctggctaggtggaatgttcgaatcaggagtgggacgagcgttgaatctgcagtttgccagccaagctcccttccacttccctggtgatctatctgcttctgatcgttatttttacgatgacatcgtcactgaacctgcgaagatcaaaaatggctgtcttcaggtgcctgttggtgtgggagcgggcttcacactagatgaaaagaaaatagctgactattgtgtttcccgtactcgtttgttaggttgaactttagaaatagtttttgatcagcagatcaattatcaagcagcaaaaagcaccttctcgcttttagagagggtgctttttgctgttatttggataaaagggcgtgcaagcgcctgttgctaagcctgttctttaaattctttctcaatttgcaaacggcgaactttcattgttgctgtacgagggatcttttcaaagtcccagagaattggctgattcaaacgaggaagatcttctactgcttgccaccaagctgtccaatccatttcacggtttggtgctaaggcaatgatcggttgcggtgaattttctttgtcacgaacgatgaccacttcagctagaaaatccaatgtatctaaaagcagatcttctaaagctaaattactatcgatggattcaatcagatccacttggcggtctttcaagaataaatgcccttcttcattcatgctgccataatcgccgctatcccaccaatctccataaacattctcagtaaaacgctgatcttctttataataagtcaatgcccgtcctttggataggaagtggatatgtccgtctgtatttgcaggcaactcattgccgtcagcatctgcgattcgtgctttggtcaaatcgcctaaaccaatccccatatcgcgagcatcatttgattgtatactttctagcgtatgtgctttcaggatcattgggccgcactcgctttggccgtatacttgcaagaagatggcatcttgattggcagaagtttgtaagaaagctgccattgtttgattattgatggcatcgaatgtggagtgataataccgtattccagcaaaagcttcaggatgttcttctgcaacgaatcgccattgcacgaagttatttgggtgtgtctctaaggcaatcggtggattctctttcaacatccgaacgacgtgaggaccattcgcactagcaagaggcatcattggaaagcccatagacatcaaagaagagatcccaatattgaagcgagaatgaaccggtgaaatatggaacgccactaattttgtttctgcgatttttgtgaagacagttcgctgccactttgtccgccaccccatagaattggccgagtgacaaatcaattttggtattcctgttgtgcctgaggtgtgggtcatataagaaatttgatcgtgaggcaattcggtttggccaacaggttcagctggttgcaacaatagattgcggacagcaatctgcttgttcgggctgctgtttttgacagctgccactcggttttctgtctcttcatcaaaaaggatataaggatcttctaagcggtcaacaaagacttcgatcgttgaagctggaaaatgataagaaatcattgctgggacagcgcctaaataagcagcagctgtagctaaaagatacgtatcaaattttgatgatttatagataatgattttatctccggcttggacgccaaggtgggcaagttgatacgcccgctttaagattatttcatgacttgaatgatatgtgctgcggtaacccaattcaggaaaagctggcaagatctcatcatgaatgattgggacgtctggataagcctccgccgcatcgcggtaattggtataaagattcaatggttgatacgctaaaatagacaaaataacacactcctttaaattgatgacggtgttttgttaacttcgatggttaataaagtcacctttctcaaactatggttcattttaacatagcgtttttttaagaatagttactttgggatttttttcacataacgtcttaaatcaactgacttacaagccgggtagggctattttgagacaatcaagtttgattagtgatactcgattggtatgttttgattggcacaagggcaaccgaggatagttagaacaaaagattctattgcgaacatcagcaggacgatagttgtcagtatgtctttttattgctatcatgaaaaaaaagacaaaggaagatcctgatggccaaaaagatacaaaataaaaaacatgtttcgcttcctcgataccagcagatcgctgtggagatcgcggaaagaatcgtggaaaatcgctacgaagttggacaaaaggttcatgcccgttcgacattagccagtaacttcaatgtgtcgccagaaacagcccgtaaagcaatcaatgtcttggtcgatttggggatcatggatgtccgtcatgggagcggcgcgtatattgcctcaaaagaaaaggcgcaatcttttttggatcagtacaaagatgttcaatcgatccaagagattcgtaaagacattttagaaagcgttgaacggcaacaacaagagctggataatttttcggaactattgaatgttttggttcggcaaacgaaaaaagtgcataatatgagcccttttctgccatttgaattgttattgaaagaagatgcccagcacttagagaaaagtgtccacgagctgaatatttggcaagtaacgggagcaaccatcgtggcaatccaaacggaacaagagttattgctctcaccaggcccttacgccaagtttagtgccggcaatacgatttattttgtcggaaatgagttggcactacaacgtatgacgaactttttttatccacaagactccgctaattgaagagcgaaagattccatttctaagaagagatggaatctttttttgacaaagtgaccacatgctgttagtatagtatggtcactttcgtgaaatttttcagaaaaaggagtcagtataagtgagtaaagttaaagttgcacatttaacgaaaatctttggcaagaagaagcaacaagcgtttgccatgattcaagaacaacgcagcaagaatgaaattctagaaaaaactggggccactgttggcgtctatgatgtgaattttgaagtcaatgaaggagaaatctttgtgattatgggactttctggtagtgggaagtcaacattgatccgtttattgaatcggttgatcgaaccatccggtggagacatttatattgatggggaagacattgcgaagatgagtaaagaagaattacgtgaagtccgacgccataagatcaacatggttttccaaagctttggtttgttccctcaccgaacgattcttgagaatacagaatatggcttagaggtgcgaggggttcccaaagaagagcgagtagccaaagctgaaaaagctttagctaattctgggctattatctttcaaggatcaatatcctgatcaactgtctggtgggatgcaacaacgggttggtctggcgcgagcattagcaaatgatccagagatcttattgatggacgaagcattctctgcgttagatccgttgattcgtcgtgaaatgcaagatgagttgttagaattacaagccaatgtccaaaagacaattatttttatcactcatgatttgaatgaagccttgcgaattggtgatcgcatcgctttgatgaaagatgggcaaatcatgcaaattgggacaggagaagagattctgaccaatcctgcgaaccaatatgtgagagatttcgtcgaagatgtcgatcgctcgaaagttttgacggctcaaaacatcatggtaccagcactaacgacaaatatcgaaatcgatgggccaagcgttgcgctaaatcgaatgcgtaaagaggaagttagtatgttgctggcggtagacaaaaaacgtcatctaaaaggtagtttgacagccgagtcggctcgcgaagcacgcaaaaacaatttgaccctaaaagaagtcatcgataaaaatgtacaaaaaatcgacaaagatatgctagtgacggatattttcaatttaatttatgattccccgacaccgttagcggtggttgaaaatgatcgtctgatcggtgtagttattcgaggcagtgtgatcgaagcactggcagaaacggattcatcagtgacagaggaaggagtggtcgtcaatgggtaattttcttcaacaaacgattccagttgctgattgggtagagtcctttacagattggctaacaggaacttttagtgggctcttttccgcattgcagtcttttggtcagttcgtgatggatggaatgactaatactttgctttttgtgccaccactagtcatgatcttgctgctgacaatcgctgcattttttgtttcaagtaaaaaatgggggttgacggcatttacatttgtcgggctactgtttatctacaatcaaggtttgtggactgatttgatgaatactgtcacattggttctgctctctagtctggtatcgatcattatcggtattcccctcggaatcttaatggcaaaaagcgaaaaggcgcaaagcatcgttacgccaatcttagatttcatgcaaacgatgcctggcttcgtctatctgatcccagcagtcgctttctttgggatcggcatggtaccaggggtttttgcctcagtgatttttgcattgccgccgactgtacggatgactaatttaggaatccgtcaaatttctcgtgaattagtcgaagcttcggattcctttgggggaactggctggcagaaattggtcaagttagaattgccattagcgaaaagtacgattttagcaggtgtcaatcaaaccacgatgcttgctctttcaatggtagtgattgcttcgatgatcggtgcccctggtcttggacgaggtgtcctatctgcactgcagcgggcacaagtcggaaatggatttgtgagtggggtttcattagtgatcttagcgatcattatggatcggtttacccaaaacttgaataaacccgctcataagaaaaaagccgtgtccgcgaaaagccgcaagcaaaaacgtctctttggcgggatcgctgccgcagctgttgttgcgctgattggtgcttctgtagcttttggtcgtgtttcagacaataaaggaacagtcaacttagcatatgtcgaatgggatacagaagtggcttccactcatgtggtagctgaagtgttaaaagaaatgggctatgaagtcaagacgacaccattagacaatgcgatcatgtgggaatctgtggctaaaggcgaagttgacgggatggtagctgcctggttgccttcgactcaccaagctcaatatgaacaatataaagaccaagtagaaaatctaggaccaaacttagagggagctaaactgggaattgcagttcctagctacatggcagttgactctatcgcagatctatcggatgaggcaggaaaaacgatcacgggaattgaaccaggtgcaggtgtggtcgctgctgctgaaaatacagttgcaacatatgataatctttctgattggaatgtggcgacatcttcttccggggcaatgactgtggcgttaggacaagccatcaagaataaagaagacattgtgatcactggctggtcgcctcactggatgtttgcaaaatatgatttgaaatatctagatgatcctgaaggaacgatgggagaagcagagagtatcaatacgatggtacgccaaggattagctgatgatctgccagaagtttatgaagtactggataaattcaattggacacaagaagatatggaagaagtcatgctggcaatcaacgatggaacttctgctgaagatgctgcaaaagattgggtaaccaatcacccagaagaagtggcagcttggacgaagtaagtcaatgaagcatgaaaggatcagataaataaacaaaaaagaaagtttcgcatctagactcggtggccgagttcaggtgtgagactttcgtttttttcactatctactgactgtctactgatagtagccagcaattttttgtgctttttcagtattggcgaaatgcagtttggtatacttcgctaataaaggcattccgcctttttgcaaaagctgagcagcgacctgatcggatttgctgccggcacccgaaggaagctgtaatccaacttcttgtgaggccttctctagttcctccagaaaaacagtgcggcatagaatggaggccgcagccactgctaaatgatattgctccccttttgttgcaaaaaacaatttttctgtgatttgatttttttctgattttagataggtacggtaatttttttcgctagtgaattgatcaatcaagatagcatccggtgtttttggtgcgattttttgcaacagtagccgaatggcttgattgtgtagcgcaactttcattcgaacggtgttgtatttaggttggatctcattgtatttagttggttcaactgtcagtaattgataaggcacaagtttttttatttttggggccattgcccgaatttgtggatcagtcaacattttggagtctttgacacctaatgctttcaatgcgggtagctgatctttactggcatagacagcgcaaacgactaaaggaccaaaataactgccattgccaacttcatcactaccaacgacactccactgtgaaaagtcagcaggcaaggaggatgaaggagccttgttgttcgcatttgctgttttggacaagtcggcagaattgctccaacgagctgcttcagcttctgcaccactaccttgaaacatcactttaccagaagtataagcggtgatggtcgtttgttcttttttggcaacaaacacggtataaggaacttttttattcaacagcgcttgctgatagaagttcatcatttctgcgatagttttttgagatactttaatgacgatattactcattgtcttcctccgatatacatactggttatctgaatagaacatcttcttagattctaccataggtaaaaattttacgaagcctctttctaaaaaaacgattggcatggaaattacactagaaatcacgtataataggtaggagtttgcgatacgcgtgcagaaagtgataaaatagtacagaacagcaatgggaggaatctttcctatgacggagcaaaagaaacgttataaagcagtaatcgccaatcaaagctacacgattattgggcgtgaaagtaaacaacatatggatatggtaacgaaattagtcaatgaccaattgacagaaatcatggggctgtcttctcaagtcgataaagagcaagcagcaattctattagcaatcaatgcgatttctgatcagttgaaaaaacaagagcaagtattaagtttgcaaaataaggtagaagagttacgcagtcaagcgattaaggcgaccgaactagagaatcggattaagcgaatcgaagcgattgagtctgaagcacgccaagtattggatgagacaggtcgcggagatgtggagatccataatcatgtggaagctcaacaaatattaaatgaacaacgtaagcgcaaaatccaagaaaaagcagctcatggttaagtaggcgcggaaaggactctgaaatgataggatttttggttctggttcttttgttagcggcattttatggtggcgcgcggcgagggacttcattgcagctggtctccgttttaggataccttttttcttttttagttgcagtggcaaattaccaagctttggcaaaaaaaattgaattatatgttccttatatgtctgtgaccgcagactcaaagttggtcttttataacctagatcttgctctagacctagacaaagcgtactatgcagctgtcgcttttattatgatcctttttgctggctggttagtgacaaaattgatttgcatttttgcaaatggactgcgtttcaaacgtctgcgttttttcaaaggctatgattgggtcgtagcagggatcttgaatacgctattagtttacctgaatatctatttcttttttatgatcctctcgatgattcctttagcgactatccaaaatttgtttgataagagcagcacggcacactttatcgttgaaagttcgccaatcatttctgattacttttatcgtttgtggatcactaatgtgattggttagtataaggcagctggtcattagacccatgctgctttttttcttaagtaaaaaaatgaaaaagtaggtgagactatgaataaaaaaattcttgatgttttagctttcgatcaagtaaaacaattggttgggcagtatctagtgaccgcccaagggaaagaagaattagctcaattagcgccatcagcagatgctcagcaaatttccacttggctggctgaaacagaagatgcgttaaaagtacagcgattgcggggcggtattcctgtaccaaaaattgaaaatattcgtccgcaaatgaagcgaatcgaaatcggagcggaccttaatggtttagaattagcgcaagtaggtcgagtgttggtgacagccaatgaattgaagcgtttctttgaagatctatcagacagcgaaatcgagttcgagcgactgtatgaatgggaaaagcagttagtaacgctgcccacgcttagccgtcgcctgaaagaagcagtggatgaagacggtcggttgactgacgaagcatctccagagctacgtgtcattcgacaaaatattcgtcgttctgaacgaacgatcagagaaacgttagatagtctcgtacgtggcggaaatgccaagtatttgagcgataccattgtcacgatgcgaaatgagcgttatgtgattccggtgaagcaagaatatcgtggcgtgtttggcggggtcgtgcatgatcagagttcttctgggcagacattatttattgaaccaaaacaagtggtggatcagaataatcgactgcgccaacatcaaatcgctgagcgtacggagattgaacgaatcttagcggaactttctgcagagctagctccttatcaacgcgaaattctgcacaacgcctatgtgatcgggatgatggacttcatgaatgccaaagcacgttttgggaaagaattgcaggcaatcgtgccggctatcaatacagataatcatgtcgttttcaaacaagcacgtcatccgctgatcgatcaagaaaaagtcgtaccgaatgatattgctattggtgaagactatcaagcggtggtaattaccggtccgaatactggtgggaaaacaatcaccttgaagacgctgggattgcttcaaatcatggggcaatctggattgccgattttagtcgatgaagagagccaaatgggcatttttcaagaaatttttgctgatattggggatgagcaatccatcgaacaaagtttatctaccttctcttctcacatgacgacgatcgtcgatgttctcaaaaaagtggaccatacaagtttagttttattcgatgaactgggagctgggactgatccgcaagaaggcgcggcgttagcgattgctattcttgatgaacttggtgcacgctctgcctatgtgatggcgacgactcattatccggaattgaaagtgtacggttacaatcgtgccaataccatcaatgcttcaatggagtttgatgtcgataccctaagcccaacatatcgtttgctgatcggtgtgcctggtcgcagtaatgcttttgaaatctccaaacgtctgggcttggacacccagatcattgagcaagccaagcaaatcatggatggcgaaagtcaggacttgaatgagatgatcgccgacttagaaaaccggcgcaagatgaccgaaacagagtatttggaaatgcggcattatgtagaagaagcggaacggctgcaaaaagaattgaaacaagcatataactttttctttgaagaacgcgaagcagaactagcaaaagcccgcaagaaagcaaatcaaatcgttgaagaagcaaaagaggaatcggaaaaaatcatttcggatatccgcaacatgcaattgagcagcggacagagccatgtcaaagaacatgagttgatcgcagcccgcacaaaattgtctgatcttcatcaagaagaacatttgcaaaagaacaaggtcttgcaaaaagccaaagctgcgaaaacattgaaggtcggcgatgaagtgttagttacttcctatggtcagcgaggaactttgatcaaaaagatgggacaatcacaatggcaagtgcaattgggaatcttaaaaatgacgctgcctgaatcagatctacagccggcagcacctgtcaaagaacctgtgcagcgcgtcgttcataccgtccgttcagcggagtcttcgcatgttcctaatcagctggatcttcgtggcaaacgctatgaagaggcattgaatgaagttgatcagtatctcgatgcggcgattcttgctggttacccacaagtgacgatcgttcacggaaaagggacgggggcattacggcaaggaattacggaatatttgaaaaatcatcgtagtgtcaaaagttttgagtttgcaccggcaaatcaaggtggcaatggggcgaccatcgtaaaatttaaataatcgttaaggcttcttaccttttgtaagcagaggattttaaaaaagcacgtgaacatgctatactttttttagcaatcaaatggaggcgaacaatatggcaaaagaaattacagataaaactttttcagaagaaaccgataaaggcttagtacttattgatttttgggcaacatggtgtggtccatgtcggatgcaagcaccaatcttggaacaattagcaaatgaatatgaagaagacgaattaaaaatcgtcaaaatggatgtggatgaaaatcctgaaacgccagcttcatttggtatcatgtcgatccctacgctattgttgaaaaaagatggtcaagtggtagataaagccgttggtgttcataccaaagatcaattgaaagaaatggtagcaagccacatgtaagaaaattttatagtaagcagcgatcttaagcgatcgctgctttttttttgagtagttttaagcgaggatttattcttgcaatggtataatgaaagtgtgaatatggggagcgtctactttctatggagtgcttttatttgaaaagggggatgaaaaatgaaaaagaatagaggatgggggtaccggctgctctgtatcatttccttggtcagtgcaccgcttgtatctgcaggtgcgacctacgcggaaacaattgatacaggaacttcttcagtcaatcaagtcaccgaatcaaccaccaataccagtaggacgacaaccgaaacgactgactcaacaactgcgacatcgtctacaatagacacgtcaacttccgaagcgagtaccaacagttcgactgatagctttggggaaacaactacaagtagttcagaaataactgtttcttccacagaagaaacggatacttcagaagcgaatccagtcatcactgttaaggaattagccaattcaaatcgctatgtcaaaatcaacactttcacagcgactacaacggagtcgcaagcaatggatagtcgtcaggttttatataccctcaatcaattgcaactaacagccacaggatcaattactgaacttgcgggtcacgtttataaaagtgtcaaacagtaccaagatacagcgacgaaaaagaagtatagtgaactacttgatgaacagaatcacgtgattggtattgttgaagcagagtctgtcacgacagcagatggggtgtttcagtcagaaaaaaaatatgctactgttcaaagtggcaattatcctttatgggagtcaattttttttgataaacagttaggcacgacaaaaacaatcaatcgacaaacgtttcaagtaaaagaaagtttcaaacacggaaacggctcgacctattatgctctgtacacggataagaaccaatttattggttggattaatgccaaaggagccgcggatgccaaatcacctggaggcatatggcaatctgaatcaaaatacgccacgatcatcagtggcaactacacattatggcaaaattttgattggtcagccaaaaaaggaacgacagctgctttgaatggaaagaccgtcaaagccacaggaaaatatagccatgttaatggtgcaacgtattattcgttgtatgacaataagaacaagtggttaggttatatcaacgctgccggtgtcaaaacgacatcaaatgcacagggagcttaccaggcttacggtaaatatgttactctaacaaagaaaaattatacaatttggggtaattttaactggtcgagcaaaaagaacactacctcttcattgtatggaaaaacttaccaggctaaaggaaaatatgaacattggaacggatcaacttactactcattgtctgattctactggcaaatggatcggctatttgaatgctgaagccgctactgtggctaataatcaaggtggcatatggcagagtgaaaacaagacgatccggatgaaaagtaagaactatacattgtggcaagatttgaatttttctaagaagaaagcttcgagtggcaattatatgaacaaaaatatcaaagtcaccggaaaatatcagcattataacggtgcgacctattactcattgtatttaaacaatacatggatcggctatatcaatgctacaggtgtcacaaatactcatgtaatccattcgcagagcaatattagccgttatgtgatcgtcaacaatgccagcgggaattttctgaatgctgctgatcctaacagcagcaaattaggaaaaaagagtaattataaagggtatatggcgaaagcaaccaaattagccaaaacgagtgatggcaattatctgtatctggtttcaccagcagggaaaatcgggtggatcaaagagaatcagacgtatagcgtgaatgataaattctggatgtacactactggtggcaagtacccctcgctaaatgtcaaaaatttaaacattcatgtgtccatcagtaagcagcgagtttacattaagtcaggcgacaaagtcatttataccatgctttgttccacggggacagtttttacgccgacaccgttaggtaattttagaattcagcaggagaaaggctccgccttttcaggagcggcttattaccgttctttcaaagatcatggtgtctatctattccataccgttccaacaagcattgcttggtcaaccaattcatttagttcggtggaaggcaaaaaactaggacagcgagcttctcatggctgtattcgattagcagtccctgatgctaaatggttctattacaacatgccttacaacactcccgtaaaaatcgttaactgattctagctgctgcatcctttgaataaggatgcagcagtttttttgtagcgaaaagagttgttgatttgcacttcactaattagagttgaaagtttttatcttctgaatagagatcaaggcctttttgatattttactttttgatattttgatagaagttagatttgtaaagtgggtcaattgactaaaaactgccctttgaaagctgtgtcgcccatttgggaaaaggatttctcttttgaatgactgacatgtccgttcgaagcttgatagggagcatcaatctcgaatccctagttgctaactaaggtaagtataaagcggtcaactaagtgtaaatagttctgaaatacgccgatagataatcagaaaactacccaaatccgggagaaaattgcttacaaaaagagattgacacttattatatcattcgataatatatcagtaagtgatatagtttcctaggatgggggaaaacacatggatgaaccattgaccgattcaacttatttgattttgttagctttattaaagccaaaacatggctatgtgatcatgaagcaaatcaatgaattaagccaaggtacctatgaaatcggtccggcaacaatgtatactatattgaaaaaattgaccaaaaatgaaatgatcagtttagaagagacaacagatcgtaaaaaaatctatcagatcacagccaaaggaaaaacggctttagaaaaggacattcagcgacgaaaacatttctttgagattggtgaacagattatgggtgagttggggggactggcagatgagcaaacgtaagacaaaacatttgtattcattaggtgttgcctattatccagaaaaagaaatgatgcggctgcaagagcaagcagcaaaaggttggcagtttgtgcatatgaatcagttcggttttttgaagtttattcaaagccaaccacaagagaagaagtttgctgtcgatttttttcaaggagacaaatctgatgttgatgaatacttggcaatgtatgaagccggcggatgggagtatattagttcctacaaaaaccgttactactattttcaggctcctttagagacaccagctatttttagtgatcagcaaagctatcaagaacgaatcgatagtgaggcacgctatcttatgaaacgttcttttggcataacaggtgttggcttggttattctgcttttgatttatctcctcgctcgctggctagtacttacctataatgagatactaggtttctcatatggtgttgcagttgggctgatttgtgcgcctcttgtcatcggtgtggtgtcatttctcatgcgtcgcttgtacaagaaccgcgcctctttttacaaagaaccagagaaactagctaagcggcaacacgtgttacgggatacgctgctctttatgggagtcggcgcattaattggaagaattatcggctttttagccggttatttatactaacttaaaagacaaggaaggtgaaattgtgttagaagcaaagaatttagtgaaaacatttggggactatcgggcagtggatcaattgtcctttcaaatcaacgatggcgagatcatggggctgatcggtcaaaatggtgctggtaaaaccacgacattccgattgattctagatttcttacgggctgaacaaggagaagtactatggaatggccatcaaatcacagaaaaggaatacaatttgattggttatttgccagaagaacggggactttaccctaaagtaaccatccaagatcaactgatttattttgcacgcttgcgtggaaaaaagaaagaagaaattgaacctaagatcgacgaatggatggaaaaattccaagtaaaagggaaaaagacagataaagttaaatcattatcgaagggaaatcagcaaaaagtccaattgatcgcaacattgattcatgaacctaaattagtcattttggatgaaccatttagcggattggaccctgtcaatgctgagttgctgaaagatggcattattgaactaaaagaaaaagggtcttgtgtcattttttctagtcataacatggataatgttgagaaaatctgcgatcatttgatcatgctaagagatggtcaaacggttctcaacggaaaagttcatgagatccgtgaatcgtttgggcggacgaaagtcttcttggaatcttcattgtcaaaagaaaccatcctagcagttgaaggtgtcgaaaaagttcttcataaagaagatgggagttatgacattacattatcgcatcctgaagtcggtcgcacattgtttgatttggccacagctgatggctatatcccgatgtttaaccaacaaccgccgacattagaagaaatctttaagagaaaggcgggaaaagacaatgagtaaattttgggtgatcgcgctcgatgtgtttaagaaaaacgtgaaatcgatctcgtttttgatcatgatattgattccatttattgcattgggcattatttatgtggtaggaatttttaccgatggaatgaacagtgccgataaaattgctgtttatgcgaatgaaccagctattgcacaaacaatcgcagctcagaaaaatgaagactatcaatttgaagtggtggattctgaagaagctggaaaaaaacaattagcggatgaaaaggtcgatgcattcttgatcgttacttcagaggccgacagtatcaaaggtgaattattgagtgaatcttctatgggacaaaccacagagttgacggttcagcaattattgtctgggttgcaagcctcgggacgtgccgcagcactcggattaaatcaggagcaagtggctagtttaagtgagccagcaaacttcagtaaacaaaaagtttctttcaccgaagatggcaaaatggagcttggggaagacaatagttcgatccaatacattgtgagttatgtcggaacaattattttattcatgtttattttgacttacgctcaaatcattgcccaagagattgcttccgaaaaagggacccggatcatggaagttattttgtccagtacgagagcacaggttcacttttatgccaaattaaccggtgtaattatggtcgcattagctcagttattggcttacgccggtatctttgctatcagttattattggatcaaagacatttcaatggtcaaagatgtattagccaatttctcaattgatggattattcggtccattcttgatttactcggtcatctttgtcctattaggaattttgatttactctgtcctgtctgctttgtgcggttcattagtcaataaagcagaggacactgccaaggcgatcattcctgtcacttacctttctttagccggttatatgttaggtttgattctaggcggtacagatcctaacaatatcattttgcgggtcacttcttatatcccgtttttatcttcatttatcatgccagtccgattggctaacgatacagtaggtatcggaggcgcggcagtctctgtagccatcttagcagtaagtacattggcattgatgctgatctcagcaagaatgtataagtcaaacgtactgatttataacgataacggcattttggcttcattgaaacaatctttcgttttgatgaagaatgaaaaatgaccagccaacaaattctccgattagttaggcttcaataaagaaaccgatgaaaagcttgtgctttctgattaccaaatggtatccagaaaaccctctgcttttcatcggtttttttctacgtagaattaggtaaagtagctttaatgagtcaagaccgccaattgatcaagctagtatccaatcagcctttaattactaactattaaagctaaacgagtcatttaaactactagtttcaaatataaccaagtcttttttcaatcaggcattgcctctgctagcgaaatctttgttggcataatgtcaaaactgatgaacaaagtagtcgaaaatttgctgttctgaagcaatttcttgtgcggttaattcaggatgccattggatccctaaaatcggcgccgcaaaggcagaagtttcaatggcttctacgataccgtcaggggcagttgcgatcacttggaaatcttttgcaacatctttaatggcttgatggtgaaatgaattcacttgataggtggttcctaataattttcctaaacgactgtcagcaacgatctcaacggcatgagtaggaaagcgaaagggtgtcggtgcttgcacatgcttgatggttggttgctcgaccaatgacaagtcttgatagaggttgccgccgaaagcaacattcaatagctgcatgccacgacagacaccaaaaattggtttttcttgtgcgacagcttctttgatcaacgccaattcaaatgcgtctcgttcaggatgtgtaccttggatcagtggatgcatctcttcgccataatagcgaggagtcacatcatgaccccctgccaaaagtaatttatcaatctgggcaacatattgggcggcattttcgggagctcccatgggtaaaataaggggaaggccagaggcttgttgaatctgtgtcacaaaatttctcggggtatatgtaatccaatgggcttccccatcaatcatcgttcgttcgttgccagcaattccaatcactggtttcataagcattctccttccagctgttttgacagcagtaatgaataaaaaactgtgacaaaaggaaaacaaaggaagctatccgaactgactttttccacgaaattgcgaggacctactagagagtagatgcaatttcgttatcgttcggatgctccatttgttgctgcacttaagtcacagtacttttttatttttcgcgaatcacttctattttgtagccatctgggtctttcacgaaatagtaagaaggagaagtaccaggcaagccttttaagtcagtaacatcaaaaccagctgctttatgctgctcgtgaagtttctctaaatcatcggtactgatcgcgatatgaccatagccgtcacctagatcatagccgggatgatcatagttataagttaattctaattcataatcatctcctggtaatgtcaggtaaaccaacgtaaatttgttttctggaaaatcacgacggcgcgattcttcaaaaccgaatgcttcttgataaaatgcaagtgatgcttcaagatctttcactcgcacacaagtatgtgccattttcatttgtcattcatcctttcaattgtggtaagcctataataacataacccgattttttgtggtaagaaaagtgcaccccgtcaagttgcagcttgtcgccagtggcttcctaaggtagaatggaaagaaagagatgatggagggaaacatggggaacaaggagaaagtgtttgggcaaaaagagccgggggctgactatatttcacgattcggtgcctatgtcgtgattccgaatgaacaccaacaagtgattttggtccaagcgccaaatggcgccttttttttaccaggaggggagattgaacccggtgaatcgaaggaagaaacgatcaaacgggaattggtcgaagaagtaggatttgcaggaaagatcgccagttatttaggggaggcggttgattatttttactcgcgacatcgagaaacgtattaccatcatccggcctatttttatttgatgactgattggcaaaaaataggtgagccaacagaacaacacaaccaactttcgtggcatacaccagaagaagccattcatttattgaaacgcggcagtcatgcctgggcagtgaaacaatgggtaaatcaaaaagacaacgatcatgcataaaggcagtgatcgttgtcttttttactcttttattttagttcatttaacacatagtcattgataactttagctacaccatcttcttcattggaagcagtgatgacgtcggccgcttgtttgacattttctgttgcattagccattgcaacgccaagacccgcatattcgaccatcgttagatcattttcgttatcaccaatcgccatgacttctgcttgtgagatacctagttcctcagctagcttctgaaccgcagcccctttatgagctttcttattcaagacttctaagaaaaatggcgcacttttgacgatattgaaacgctcagtcaatgaagttggcaattgcggaataatagcatcgatcaattcaggctcatcgatcatcatcattttgatgatattcagatccgcagtcatttcttccggtgtacgatatttcaaaggcatattgaccaaaaaggcttcatagacggtataaggactgatgtctcgattcgctgtgtacatcgtatcttgggtttccacatgcaaatgaacccctaatttacgggcagtcatttctacttctaagtattcttcatgcgtcaatccgaattcagaaacgatttcttttgttttagtcttctgtacgagagaaccattatatgtgattacgtagtccgtttctgaaaacaagtctagttcacttaataaatcttggacacctgttaaggggcggccagtacataagacgattcgaacaccctgtgcctccgcagcttttagtgcttggtacactccaggtgtgatttttcgatcattgttcagtaacgtgccatcgatatcgatagcaatcagtttgatgctcataacttcctcctagttgttcgtattgatcaaggcaccattgcgaatatgtttcgcaaactcttgatacgtatcccaaaataaatcatagtgattttgtagtgcggggtcaatcatttcttttgggaaataaaagcgctggtctccttgtgtttgaccagcaagtgcagctactagttgactagccttggataattccactagggagccgtctttttcttgcagttcgatttgtgtccgatgcatgccggaagttgggcgataaaagtcataaggtaaatcgaaactagaattgattgctgtgtaatagtcggggttaaaaccgactttttcgacaagagattgcagttcatgaatcaatggcaattgagtgtcttcttcaaaacgtgcagacttcagcggtttgcggttcaagaatcgtttggctaaatcactaagaatcggatcattttcttccgtccactgagtgaagtaagtattcaagacgccatcgtctagttttaggtattcttccaaagtaaagtgctgtttaagaaagggcagcaaaagctgggaatgcgattggaaaatttcttcatgttcttgatacaattcggcagcgcgatttagtaaatgtgccaagataacttccattccccgagaactggcatggaaatagacttggacatacatttgatagcggctgacaatataatcttctaccgcatgcatgccactcatagaaaatgcgatcccgccagcatagggacgaatgactcgcagaatacgtgtcaaatcaaatgtgccgtattccgttcccgtgaagtatgcatcccgcagtaaataatccatgcgatccgcatcgatctgactggaaatcatttgcaccacttgtgggtttgggtatgtcttagtaataacactggccactttttcaggaaaaccttcttccacacgattgaggatttgatagacttctgtttctggagaagtaatgatcgctacagtgatggcttcgtgatcggtatgaaaaatatgttcaaaagtgtgagaataagggccatggccaacatcatgcaacaaagcagcacaaagcgtgaccaatcgttcccggtcatcccagccatcagacccaactttttcaactgggaaatttcgttgaaacaaatcacagatgcggcggctaatttcgtaaacccctaacgaatgtgagaagcgactatgttcagcaccatgaaaagtaaacgaagaagttcctagttgtttgattcttcgcaggcgctgtacttctttcgaattgatcaagtccaagatcacttgatgctgcacatgcacatagttgtgtacaggatcacggaatactttttcaatagcaagtgtttgatacttatatgggatgctcattgtgaactctcctttatcggttgatttcgttgatacatattggtcatacgagcctctagtaatgccgcttgatcatttttttcaacccattcggatgcagtcacagggctgagagaggacttagttagccgcatcaaggcctcttgcagtcgtgaggcagcttctgatacagagaaagaacgctgaagcacatcttggagtgttgtcatactggtaggttcaacggcgggatagccattagtaccaaactgctctttcaagcttctttgataaaacgttcttactacttctcctcgatagtgttggtcgccgttgacactaaggtacatcatgactgcaattcctgctttgatcctgcgctgggcagtccctgcgattttctttccgtccatactcaagtcaaaggtaccgggacaataagagtttgggatttcataggccgcaatttctttttcgggaaatgcttctcgcatcaagtcgaccattcgctgataagccgcatctgtagtagcagctaacgtttttgggaaaatccacgatacattcagaacaccggcatcgttgatgaccccaagcccgcctgagttgcggatgattggttgaaagccagcagtcgtcaaagcggatattccttcggtgaaataaggcactcgggtatctttcattcctaaaatcatagtatcaggcaactgccaaaagtgtaaaaattcctgatgatgaacgcctgcatattcactcaatacatcggtcaatgcaaacggtaaaaaacgattctcggtagtttggggatcaaatggcaacatttgatcaatcatttcaatggtcacggtaggcttagattctccttcaataataagatctcctactattatatatgaagatcatgaaaaaacttaatcaaaaagctaagaaaacgttctatagtggatgttttagctgaaatgattgacaaaagaggggaaaaaaggaaaaatgaaactgaaatctgctaaggaggcacactatcatgagggaattgtcacaaggaattccgatttcgatccatttaacgacaaaggtcgaacaagcgggagaaacacaagattttttgtttgatttacaaggacaggcggtcaaaatcggcgatacgctgtatctgagatacaaagagattcagccagaaggagccgaagtaccagtgacgatgaaaattatgccagatggcgtgatccaactgattcgctcgggagaaatgcgaacacgcttgaaattcgcttacaaagaacgtttagaaacaagttatcaaacgccttacggcacgatgcatttccatacatatacaagtcacttacatgtgagtctgaaagatcgtccttattcaggtaaagtcgatgtccattatgatttatttatgatggaagacaaagtgggagaatacaaactttctttggagtttactgcttaaataaatgcaaattttgaaagaataaattgcaatttgtctcacatttttgtatgattaggagtagactgtgaaaggacgtgtcccgtttggaaattaatgtatttgaaggtgtaaataaaaacgaattgtcaatgatcgaagttgcccatgcgattttagagcaacgcggtgacgtgatggatttttctgatttggtcaaccaaatccaaaactatctagaaacttcggacagcgagattcgtgattctttggcgcagttttatacagacttgaatatcgatggcagttttatttctttgggagacaatcgctggggattgcgttcatggtatgcgatcgactcaatcgatgaagaagtcaaccacggaatcgatgatgaagatgaagatacaccgcgtcgtcgcaaacgtaagaaagtgaatgcctttattagtgacgatgaagacgcgatcgattataacgatgatgacccagaggatactgatttgtctgatgacgatgaagaggatctttttgacgatgatgacgatgaggatgaagaaatctccgcatataactcagatctgcaagaaattggtgcagacaataacgatgatgacgaagaggaactaccagggaacattgaagaagatctaacgatcatcgatgatgatgaagaagacgaatttgatgacgaggaagaagaggaataggcctcttcttttttgtgtttagcaaaggcaacagcgtatggaagatggcaagagctcaatcaaaataaaaaaccacggaagtgctgtcagcacttccgtggttttttgaattatcccttgagataaagtatactataaatgaaatgaaaaacgcgccttgagggaatcgaacccccgtctcaagaaccggaatcttacgtgatatccactacactaaaggcgcgaagcacaaataacagtttaaccaattttctcagaaaaaacaagaggtaaaatgatgaaatttcaacaacaattttcgcaacaacaaaaacagacacaaaagttggcgatgacgcagaaattacagcagtcgatccaagtgctgcaattttcatcagatgaactgcttgctttcgtagataatcaggcattagagaatcccctgatcgatttaacggaccatgaatatccgacgagttatactcaaggcagtgggacatctgagcaattcaatgaatatttgaatcagatcccaaatagaggaagttcgctctttgagtatttgatcgatcaaatccatttaaattaccgagacacctttctacgcaccgtcgtgttatttctagtggaatatattgatttgaatggatttttgaccattgatttggtgaaggctggtcaaatgatcggagcttcagagattcagatgctcgatgccttgacactgattcagcagttggatccagcgggtgtcggcgcacgagatctacgagaatgcctcatgcttcaaactgaacgggacgatgctgcgccagaactcgcctatatcgttcttgaagaatggttcacggaattagcagagcgcaagtgggacaaaatagcgaaaaatctagcagtttcgctttcagaaattcagaaggtgtttgactatatccaaacgttgactccaacaccaggggcggcctttgggtctacagatggtttgtatatcatcccagatttgcgagttacgattactgaaggccagccagtggttacctctaatcgacgagcaatgccggaagtccgtttccaacaacactattttgatcaattaaaacaaagtggcgatgctgaggtaaagaaatatttagacaacaaagcccaagaatttgaatggctaaaaaagactctccagcagcgaggagataccatctatcgagtgggagaagcgatcgttcatcatcagcaagacttttttttacaagctgaccgaccattgaagccattaatcctcaaagaaatcgctgacgaattaggtattcacgaatcgacagtcagtcgtgccgtcaatgggaaatatttggagacagaatttggtgtttttgaactgaagtccttctttggtcaaaaagtgtccacccaaagtggagaggatgtcaccacggaggcaatcaagcgacgtttggcagctttgatcaacgaagagaataagcagaagccgctttctgatcaaaaattggctgatttgttaaaagcggaagaagtggaaatttctcgacggactgttgccaagtatcgtgaggctcttaatattcctggatcttctaaacgaaagcggtttgattgatttttcgatacagttcttgttctgatccagctattgaagaaagattcaacaagaatgacggcaaaaagtccaatgaccccacctcttatacataagaagacaggtaagcaatttgggtttcatataaccgtagcaaaggcagggctacttgtgataaatagctctgcccgcttttcataggcggtcgctgatccttttgctcgagtttttctttgttgatttcttttactagtttgaaagctatttttggctgtgataagaatccgctttacggttaaaaaagtttggagaatcattttttataattgaaatagttgcatgaggcgtccagaagtgctactattattggtgtaagagatgaattaaattttttttggaatagatgggtcattttaagtcattgtaggacaaaaaaagtccaacgggaggatgcaaaatgctcgatgaattgaaattgattgaggcaatcaccccggatatcctcgcggtgcttcaagaacgttaccgtattttacggactatctattggatgcaaccagtagggcggcggacattgtctgaaagcttagcaatgacggaacgtgtgttgaggtctgaaacggatatcctcaaaaaacttaaattgattgattcgtctaaaagcggtatgcaattaacggcctatggcgaagaaatctatacaaaaatcggcagtttgatggatcaattgtttggcatgcatcaaacagagaagcggttatccgagtacttcgggattgatcgttgcttgattgccagcggtgatggggaccgtcaaccgaaagtgattgctgaattcggtcagctgcttaatgagtcgttagacttattgctgccagatggtgagaatacgatcgctgtgatgggcggtacgacaatggcaaaagttgccgaagaactaggcaatcttgaaactggcaaacgccataacttgtttgtcccagccagagggggcatcggagaagcagtcaatgttcaggcaaattcagtcggatcagtgatggcgatgcgtaccaatggtaattatcgttccctatttgtaccggaacaattaagcactaacacctatgaatttttgttgaaagaaccagcgatccttgatgtcttaaacttgataagtcaagcaaattgtgttattcatagtattggacgagcactgcatatggcagctcgaagaaagatgtcagaaaaagagatcctgatgctgaaacaaaagaatgcagtagcggaatccttcggttatttctttaatgaagcaggcgaggtcgtttataaaattcctcgtatcggactgcagttgaaggacttgcagaacgtgccgatcattttcgcaatcgcaggcggtaaatcaaaagccaaagcgatcaatgcatacatgaaaaatgcaccaaaacaaacatggctcatcacagatgaagcctgtgccaatgagattttaaaaggggcaaccctttaaaataaatatttttatgattttcataaggaggaaatcttaaatgacagttaaagtaggtattaatggatttggacgtatcggacgcttagcatttcgtcgtatccaagaagtagaaggaatcgaagttgtggctatcaacgacttaacagacgctaaaatgttagcacacttgttaaaatatgatacaacacaaggacgtttcaacggtacagttgaagttcatgaaggatcattcaacgtgaacggaaacgaaatcaaagttctagcaaaccgcaaccctgaagaattgccttggggcgaattaggtgttgaaatcgtgctagaatgtactggattcttcacttctaaatcagctgctgaaaaacatttaacagctggtgcaaaacgtgtagttatctcagctcctggcggaaacgatgtaccaacaatcgtttacaacacaaaccacgaaactttaacaggtgatgaaacagtaatttctggtgcttcatgtacaactaactgtttagctcctatggctaaaacattgaatgacaaatttggtgtgatcgaaggcttgatgactacgatccatgcttacacaggtgaccaaatgactctagacggaccacaccctaaaggtgacttccgccgtgcgcgtgctgctgcagcaaacatcgttcctaactcaactggtgctgctaaagctattggcttggtaattcctgaattgaacggtaaattagacggagctgctcaacgtgttcctgttgcaactggttcattaactgaattagttacagttcttgacaaagaagtaactgttgacgaagtaaacgcagcaatgaaagaagcttcaaacgaatcttacggttacaacacagacgaaatcgtttcttctgatatcgttggtatgacttacggttcactatttgatgcaactcaaacaaaagttatgactgttggcgacaaacaattagttaaaactgttgcttggtatgataacgaaatgtcatacactgcacaattagtacgtactttagaatacttcgctaaattataagatttgcgtcgtacattcatttaaaccatcgcaagagaaagcggggaagcagcgcgcttctccgctttttttaacaattacattaggaggaatctgttcatggctaaaatgacagttcaagatatcgatttaaaagataaaaaagttcttgtgcgtgtggatttcaatgttccattgaaagacggtgtgatcggtgacgacactcgtatcaaagcagcacttccaacaattaattacgtgatcgaaaatggcggaaaagcaattcttttctctcacttaggtcgtgtcaaagaagaagcagataaagaaggcaaatctttagcaccagtagcaaaacgtctaggcgaattgttaggcaaagaagtgactttcgttcctgaaacacgtggggaaaaattggaagcagcaatcaacaacatgaaagacggcgatgttgttgttttcgaaaacactcgttttgaagatgttgacggcaaaaaagaaagcaaaaacgatccagagcttggtaaatattgggcttcattaggggatgtttttgtcaatgatgcatttggtacagctcaccgtgcccatgcttcaaacgtcggaatcgcttctacaggaatcccaacagttgctggattcttaatggaaaaagaaatcaaatttattggtgaagcagtcgaagaaccaaaacgtccaatggtagcgattcttggtggtgcgaaagtatctgacaaaatcggtgtcattgaaaacttgattcctaaagcagacaagatcttgatcggtggcggaatgacttatacattctacaaagcaaaaggaatggaaattggtaactctcttgttgaagcggataaagttgagttggcaaaagaattgatcgaaaaagctggcgataaacttgttttaccagttgactcaatcacagctgctgaattttcaaatgatgttccaacagaagaacatactggtgatgttcctgaaggtcaaatgggcttagatatcggacctgaaacaattgcattgttcgctgaaacattaaaaggtgcaaaaacagttgtttggaacggaccaatgggtgtgttcgaaatgtcaaactttgctaatggtaccatcggtgtttgtgaagcaatcgcaaaccttgaagatgcaacaacaatcatcggtggtggagattcagctgcagctgcagaacaattaggttttgctgataaattcactcacatctcaacaggtggcggtgctagtttagaacttctagaaggtaaaactcttcctggattagcagcaatcaacgacaaataatcaagcaatgacgcggctgcgttgcaataagcagccgtgacccttaaataacaaaggagtgccagaaaaatgcgcaaaccaattattgccggaaactggaaaatgaataaaactgcgaaagaagcaaaagaatttgctgaagcagtcaaaacaaaaattcctagcaacgataaagtagattctgttatcggagcaccagcgttgttcttggaaacattagtaacagctgcagaaggtacagaattaaaaattgctgctcaaaacagctactgggaaaatgaaggtgcctttacaggagaaacttcaccagctgctttagctgacttaggtgttgactatgtaatcatcggtcactcagaacgccgtgaatatttccatgaaactgacgaagacatcaacaaaaaagcgaaagcaattttcgcaaatggtatgatcccaatcctatgttgtggtgaatctttagaaacttatgaagctggaaaaacagctgaatggatcgaaggacaaatcactgccggtttagaaggattgacagatggccaagtcagcaatctagtcattgcttacgaaccaatttgggcgatcggtacaggtaaatcagcagatgcacaaattgctgatgaaatctgtggtgttgtacgtcaaacagttgaaaaattatacggtaaagaagtttctgatgctgtacgtatccaatacggtggttctgtaaaacctgaaaatattgcagaatacatggcaaaagaaaatgtagatggagcattagttggcggcgcaagcttgcaagctgattcattcctagcattgttggatgcagtaaaataatttcattctcatgaaaatattgtttgcagaaaacagcttttttcactacaattaagatgttcgcaagggagattcccttaagataaaacaaactcaaaggagagacaaaacatgtcaattattactgatgtttacgcacgcgaagtcctagactcacgtggtaacccaactatcgaagtagaagtctacacagaatcaggtgctttcggccgtggaatggttccttcaggagcttcaacaggtgaacacgaagcagttgaattacgtgatggcgacaaagctcgttatggtggtaaaggtgtaacgaaagcagttgacaatgtaaataacgtcattgctgaagcaatcatcggctacgatgtacgtgaccaaatggctatcgataaagcaatgatcgctttagatggaactcctaacaaaggcaaattaggtgctaacgcaattcttggtgtttctattgccgttgctcgtgcagctgctgattatttagaagtacctttataccactacttaggcggattcaatacaaaagtattgccaacacctatgatgaacatcatcaacggcggatctcactcagatgctccgatcgctttccaagaattcatgatcttgcctgtaggcgcacctacattcaaagaaggtctacgttggggtgctgaagtattccatgcattgaaatcaatcttatctaaacgtggtttagaaacatcagtaggtgacgaaggtggtttcgctcctcgttttgaaggaactgaagatggtgttgaaacaatcttagaagctatcaaagctgctggtttagaaccaggtaaagacgtttacctaggatttgactgtgcttcttctgaattctacgaaaatggcgtgtacgactacacgaaatttgaaggcgaaaacggtgtgaaacgtacagctgcagaacaagttgactacttggaagagttagttaacaaatacccaatcattacaatcgaagatggtatggatgaaaacgactgggatggttggaaactattgactgaacgtctaggcgacaaagttcaattagttggtgacgacttgtttgttacaaacactgaaatccttgaaaaaggaatcaaaaacggtatcggtaactcaatcctaatcaaagtaaaccaaatcggtacattgactgaaacattcaatgcgatcgaaatggctaaagaagctggttatactgccgttgtttctcaccgttcaggtgaaacagaagattcaacaatctctgatatcgcagttgcaacaaatgctggccaaatcaaaactggttctctttcacgtactgaccgtattgctaaatacaaccaattactacgtatcgaagaccaacttggtgaagttgctgaatacaaaggcttgcaagctttttacaacttgaaaaacaaataatctttcgatgattacattgctctgaaagagcagcggttgatttaacaaccgctgtgatttcagagcttttttgctgtctggattaagtgatttgaatcaagacttatttttctcatggaacagagagcagtcttttcttctttattttctttttctaaaaaaagaaattatagttctggtttagcgaaactctataataaaagaaaaaataaatttaggagaaatacatggtgtatgattatctaatcgttggtacaggactatttggctcggtttttgcttatgaagcagctaaacggggacactcggtgaaaatgttggaaaaacgagcacatattggtggcaactgttatacagaaaaacaagtcggaattgacatacataaatatggtgcgcatatctttcacacatcgagcaaaaaaatttgggactacgtcaatcagtttgctgatttttatccctatattcatgaacctattgcaaactataaaggtgagctatataatctccccttcaatatgaacacgttttaccaattatggggaaccaaaagaccagatgaagctcgcatcaaactaatggctcaaattgaaaagacaggaataaaaagaccccgaaatttagaagaacaagctctttctttggtggggacagatatttatcataagctgatcaaaggctatacggaaaaacagtggggacgaggatgtgctcagctaccttcttttattattaaaagactgccggtccggtatacatttaacaacaattattttacggatacttttcaaggcattccaaaattgggctatacagaaatgattcaaaaaatgctttcaaatccactgattgaagtttctttagaaactgatttttttgcagaccgtacgcgtcatgaagcatcaaccaagaagattgtttatactggaatgattgaccaatattttgactattgttacggggagttggcctatcgttctttacattttgaaactggaacatatgatacagataattatcaaggaacagcagttatgaactttacagacagtcaaacgccctatacgcgaatcattgagcataaacatttttgtccagttgtgacaaaaaaaacagttgtcacgaaagaatttccaaaaacttggcggaagggagacattccttactacccaattaacgatcaaatcaatcatgctctgtatcacaagtatgaaaaattagcgcatcagcaaaaaaaatgtttatttggtgggcgtctagcaaactatcgttattatgatatggatgatacgattgcagccgctttaaaactagtcaaacatgaatttcaagcagagtgacttcttttatggaagaggttgctctttttttgtcccgattctgggacaaaacgtaacttttttactagttatgaaataatgaattgtcctatcttttaaaaataggactaggggaagcttataaaaatagttttatgaaaggggagaaaaataaacgtaatgagtaaaaagaataattatcgaaagttgctacgctccaataagagtgaacgctacaagatgtataaaagcggaaaacattgggtctatgcaacgatcacttcttttactggcattgctggattgagtatcacaccaatcgtggcgcatgcttcagaaatcacaccgcctttagatgcaagcaaagaagcaaatgccgagaacgtcttggcaaataaaacgaatgccaaaattcctgcttcatcgacgcaagaaagtgaggctacttcacaatctgaaagcatgcgtccatcggaaagtttttctgaatccgaaagcaacacccagtcacaaagtgcgacagagtcaacgagtgtaacagaatcacagagtatgagtgattcagaaactgaaaacaatgctaccagtatcgaggcatctcaaagtgtttctgaatcaatgagtctttcggaagagaagagcggatctgaatcagaaagtttgagtatctctgaaagcgcctcgatttctgaaagtggctcattgtcgtcaagtgcctcagaatcgacaagtctatcgttgtcacaatcgacaagtggctctcattcaacttcagtaagtcaaaagaaccaaccaaaacaaactgtttccgaaaaaaataaagtggagtcacaaaaagcacaagatctcttcgatcaattagtacccaagaaagtacaagcgtcggttgacaccacgacgaatgcattagaaattgttgtcaaagatggcaaatcaccaagcacatctttgattcgggcagcacaacaatatgctagtgccaataatttgattgctagttttgccatcaccacccaatcagggcagattgttaaaatcaatgtttctgcggatccagatatgggccgagaagaatttgagcaggcaatcaacgatggtaacaaaaccaattcaccttctggggtgacggttgatgttccggaccaagtgaaaaataaggaattatacaagcaaacagctattgctaatggcacttatgcagcagtgaatgactgggctacgctgaaagcagcatatggaaatgcttcgattacctatattgaggtaaccgctaatattacggcagctaccaatgtggctacccgtgatttaggatggcgggcaacgagtgtgattattgacggtaatgggtttacagtcaatatggcaggagcagcatttaatgtagggacaagttctacagttcgcggttctatctttacgatcacagatgtgaatttgattcattggcaatcaggtaccaactcaggagacagtggcacaggtaatgcagatggagtgatcgattcacgatcagcaaccggaggttatgggtactggtacttcaatatcaataatgtgactctcgaaggccaagatggtgttagcgggacagatacctcataccaaccacgacgattgctggatgcagaggacagtcacgttactttatcaggtaaagtcatcgcaaatgtcaaacaagaattgatgcaaattggtgaagtagcaatcgctaacggagcccatgtagagttgaatcggacagctggtactaccggctactccatgttttactatatggcaatccgtggcaataatgcgagtgatacaggattcaatcacacctttaaagtgggcgatggcgcgacaattattggaaacgagctaagtacctataacagcaacaactatccccttgtctattatggatttaactcaattactgtcggagatgacgtaacttggaaacaagacggtttccaaatgctactcgatttttctcgttactcgggaagtcaatcaaatgaccgaaccgcaacttttggtcaaaatctgcaaatgacggcaactcgtacagtaggttccaactcgctaaacgtcacgaatagagcggttgttacatttaatgcaggaacggtacttgatctgcaacaatggaatgccaacactgttgtgaacgtggcttccggtgcaacagttcgctttatttcaccgcgggcattgcacttagcccgtctaacttcttcaggagctgtttcggcaggtcgattgattaccggttcgggaacatttgtcatgaataattctcagatcagtacatggcaaggcagcagtagccaaaccgctgctccagaaggcaaccgtaacttaaaattcgtggaaatgactatttcaggttcgacaacaactattaaagatacggctggaaatgttactacatctaacattgtagacacttctacccgtgaattagcgactgttgcgattgcgccaggaaccgtaaccgtaaattatgttgatcagtacggcaatattattaaaactgttgatatgccaattgatccagacgttaattacattggtgagtatcttgatttgcaaacattggagtatgccaatgagttaatgcctgaaaattatatgtgggcaatcggtacccaagttgctagttcagctaaaaatgatggtcaaagcggcggagatagtacgactaatgccgataatggggacagctatgggcaagcgacggttgcgattgttccaatggagaacacaaattatacttataatatttatgtatatggtgttgccaatcattcggttcagtaccaatatgtcgacgttaagactggtcaagtaatctcttctgagtatatgaatgctggtaccgaagcttccggaacagatagaattcctgcaaactacgggaatgttatcgattggacaaatagttactatacttcgactaatttgccaccaggttactattatgcaacaggtgccgtattgaatggcaatgtacagcctggatctactacagttggaactgaagcgagtctgacaaccatttacgttgcagcagacacacaaactgtcaatgtaacttttgttaattcagatggccgtccattacaaaaccaagttggcacagttgctatcaatgggacgactggtcaagaactaagctattctgacttaatcgcagattacctaactcaagctggttattatgcagatcaaactggaacatttgtttttgatagtactagtaataatggcagtacaacagacagtgatcaacaatttattacgatcactctttatccatcctatcaagaagtcggtgtcgttggtaataatcaacctgaatcagatcctgctacaggggaagcatttgagcaaatcccaggaactgtcactgttggaaaatatggtacttccggtgtttcaaatgaaagtttcactcttggggtgacagatgcagatttagagagaaatgggtatatctatacggttacaggaccagatggagtagtctacaatacattagcggaagctatggctgccaatcaaacttttgatactaccagcaatggagcatctcaaacggattcttcgccacagatgtttacggtcaattatgaacaagacccggtatcattgtctacgtccgagtctatttcgggaagcgaatcattatcagaatccattgttacttctacttctgagtcagaaagtgtttctctttctcaatcaatttcagaaagtgactcattatcagaatcgatctctgttagtgattcagaatcaatttctacatcaattagtgcgtctgtttcagtatcagattcagagagcaactcagtgtcattgtctatttcagaaagtgaatctgacatgaatgactcgacttctgaatcattgtcaacatcaatctctacttcaacttctttaagtgattcagaatcggtttcgatttcattgagtgactcagagtcaacgtctctttctatcagtgaatctgtttcggtatcagactcagaaagtggttcgttatctacatctatttcagaaagcgaatcaatgtctctatcaatttctattagtgattcagaatcgttgtcagaatccctatctgaaagtatttcaacatctatttcattatcggatagtgattcaatgtcagaaagcctttcggcatcagaatcgttatctatatcagctagtgtatcagagtctgattcggaaagtgatagttccagcttaagtgcgtctgtttctggatcattgagcaacagtacaagtgattctgaaagtttatctttatcagagtcagtatcagtttcactctcggaatcactaagtgaatccacgtcactatctctgtcagaaagtgactcagtatcagaaagtatttcagcatcagaatcattatctgtcgctatcagtgaatcggattcttcttccctcagtgaaagcattagtttgagtgaatctatttctgattcgttgagtgcaagcatgagtttatccgaaagcttatcggagtcagaatcgatctcaaattcaattagtacgtcgatgtcattgagcattagcgatagtaatagtgagtctagtagtgaatcagccagctatagcggcagtacgagtgtaagtaatagcgattcaacaagtgaaagtatttctgcaagtaattcactatcagtaagtatcagtgagtcaaccagtttgagcacatcaatcagtgattcatcctcattgagtacaagcatttctaactcactaagtgcgagcgaatctgcaagttacagcagtagtacgagcgtaagtaacagtgattcgacaagtgtgagtacgtcagttagcgaatcaacatctacaagtatcagtgactcaatcagtgccagcatatcaactagtgattctttatcggtaagtattagtgattcaacgagcttgagtacctcacttagtgattcatcctcagtgagtgtcagcgtttcgacatcactaagtgcaagtgaatcaacaagttacagcggcagtacgagtgtaagtaatagcgattcaacaagtgaaagtatttctgcaagcaattcactatcagtaagtatcagtgagtcaaccagcttgagcacctcacttagtgattcattgtcattgagtacaagtatttccgcctcactaagtgcgagtgattctgcaagttacagtggcagcactagcgtaagtatcagcgagtcagcaagcttgagcacatcaatcagtgattcatcatcattgagcacaagtatttctgcatcattaagcgcgagcgattctgcaagttacagcggtagtacgagcgtaagcaacagtgattcgacaagtgcaagtacgtcagctagtgagtcaacatctgcaagtattagtgactcaacaagcataagtacgtcgatcagtgactctatgtcattgagtacaagtatttccacatcactaagtgcgagcgattctgcaagttacagcggtagtacgagcgtaagtaacagtgactcgacaagtacaagtacatcaatcagcgattcgttgtctctgagcacaagcatttctgcatcactaagtgcgagcgattccgcaagcttcagtggtagcacaagtgtaagtaacagtgagtcaacaagtacaagcacttcgatcagtgattcattatcagtaagcacaagtatcagtaatagtgaatccgcaagtgcaagtacgtcaatcgttaaaaaagagctgacggctttgacggatcaattcattgattatgtcaatagtgatcaggatgttcaatatgcggatacaatactgatccgggatatttctgcaggaacgatcaatgaaaacacagtgaatcaggtattagctaaaatggggctatcttgtaaagtgtttaataataaaaatgcgctgggaatgtatttatttggggaattgttctggcaagaccaaccgaagacttcggctgatcgctttgaggatagccgtccatcagctatgaatcatggtttttcagaaccggaagtgcgtgcagaatctgcaccaatcgaagagtacgtcgaatcaactaaccaaattgattccgagctatcagaagttaccgagcaaaagagtcattatcgaagctcatctgtggaagcaatttttgcagaacagtcagaattgcttaaattcttgatcaatgatgacaaggagccttccatttagcaatgaaaaagagaattttgatcgataaacgatcaagattctctttttctcgtggttggatttttttgcttaaatccgatactcgaatagggcaagaattggtcatcggcaatcatctatcagccaaactgtcgcagatgaatgaaggatcattctgtgctttaatcttcttcggaggtttgctccttctgattgctggtatcttcagctaccgtcaccgtaaaaaaaatctttggggaaaatcaatttatctggttcagaaatgttttttctcaaaggtttttgattactggttattttataaggacacctaaaatctgtttaaatttttggctcatttgctgtgcagatggtacactagagtcaagggagggatcctatgctttggctgataattgtacttattggactgattgctgggttatactatatttaccgaactgcagtcctaaaaaaaggtgtacgttattttgtatctgctctgatcatgcgcaataaccattggtatgaaaaagaaggcagaaaacaacttgttccttcgggacagcgatcacaggaagcaccttcaactttctggcaagaagggtccgaatgtacccttactgcaacggatgatgttctgttacatgcacgggtctttgatcagtgtgccaaaacatgggtgatttgtcttcatggctatcgcagttctggacaagtcgattgtcaagatgccgcggaacgcttgtggcaagccggacacaatgtcttagtgccagatcttcgcggacacgggcaaagtgaagggcttcaaatcgggttaggctggttggatcgcttagatctgattctctggatcgagaaattagttgaaaaagatgcgcaatgccagattttcttgtatggtcaagggatgggggccgcaacagtcctcttagcgagtggagaagtattgcctattcaagttcgaggattgattgcagacagcagctatacctcgatctatagtttgatacgagccaatttaccgcgtctttctggattacccgtcaaacggttcctgcgtatggcaaatcgttacagtaaacaattagtagggtacccatttctacagatctctgtcacacgccaactaggcagtaaccatttacctgttttatttttacatggttctgaagatccatttgtctcagcagaagaaacagacacattgatggaagcaactgctggggaaaaaaaacgagtcatttttccagagatgggccatcttcaagcggtcacagaaagtccagaatattggccgactattctacaatttatccaggcaacagagtaatagtgcatttgaatttttttaactagaaaggaatgtgaaaaaatggaaatcaaagaagaaaacaaacgttttgccttatacgatgacggcaaggaaataggagaaatcacctggcaagaggcgccagacgatgtgttggtggttgatcatacatttgttgattctgcgtatcgcggtcagaagttagcacaaaagttactgaatgcggtggtagaaaaagcgcgccgcgaagatcgaaaaatcatgccagtttgttcattcgctgtcaaagagttcaaagaaaaatcagaatatgatgatgtattggctcgctgaatttcggtagaaaatgattgagacaacagtcgtgcaacaacgatctttatgttgctgtacggctagtgtctttttttgttccgggatttagtagttgtcttgtttggatgcagggaacatcgccatagcatcaataaaatatactggaaaaaaggtcccgaatgtggtagagttaaaaggacgattctagcaagcaaggaggagctatcgtgtacaatatattattagcagcagtgattgtgatttctgtgatcatggttattacgattatgatgcaaccaagcaaacaaaatagtgctgccagcgcgtttacgggtggagcagaccaattgttcggtaaacaaaaagcgcgtggatttgaagcggtaatgcaacgttcaactgccattttaggctttgtatggatggtcttgctatttcttttggcctatttgtcatcaaaataattggatgaaatttggaacctctcggctgcgaggggttttttctttgccaaaaatcttatgaacgcatttatcgttgaaatcatcgaactatggtagaattggacgtgaggtgaaacgaagaaatgaagaattttaaccaaccaaaaccagtgtttgctccccacggagatcgggcagtgattttgttccatgcttattctggtagtcccaatgatgtgcggatgctttgccggtttttagaacaaaaagagtatactgtttatacaccgatgttttcgggtcatgggacaacaaaccctgaagatattttgaatcaaggaattcaacaatggcgagcagatgccaaagcagcgattgaatttttgaaagaaaaaggttaccaaaaaattgctgtgttgggattgtcaatgggaggcatctttgccatgaacagtttgacacaagcggaacctgcgctaatcggtggtgggctattctgttcaccgctctttgaaacaaagaatgatgtgccgcgaaattttgaaaaatatgcagaaatgattctgcaatactcttcttattcatccgaagagcagcaaatgattttggctcgcgtaccgcaacaagtcagagatcagctgctagaaattgaatcgattgggcaagaaacagcaactaatcttgacacgatcgatgtgcctgtttttcttgcacaagcaggaagagaccgtatgatcgatccccagacggtttttcgcacagcagcagcattgtctcatgtgccctacacattacagtggtatccacatagtggacatgtagtgactgtcggcccagaacgaaaaaaattagaacaagatgtttgggcttttctggaaagcctcgcttgggaagggtaaaaaatgaaagagacgattaaaacaaaaattattcagttcatggaagaaagccgcaagaaaagcttttccatggaagaaattgccgaagcattgcaactacaaaaaagcgaggatttcaaaaatcttgttcaaacagtagccgcaatggaacgagaggggagcattctcttcaataagaaaggcaaagtcaaattgccaatgcagcgagtcttagttgaaggaacattccgagcaaacgaacgaggctttggatttgtgagtatcgatgaggaagaagaagacatctatattcctaaagaatcgactggctatgcgatggatggagatacagttgctatcgacatacttcatgctgctgatcctttttccgataaaggggcagagggcaaagtcgttgaaatccgcaaacgggcagtcacacaagttgtcggtgagtttacactctttgatgaagcggagatccaagaaacagacctctatggagtcgttcagccaaaagataaaaaaatgaatgagttaaaagtattcatcggtgcagaaggcgttcgtccggtagatggcagcattgtgatcgttgagatcactcactatccggagaaaggctactctaaaagcttggaaggactagtcaaaaaagtagttggtcataaaaatgatcctggaatggatattttgtcgatcgtcgtagctaacggcattccgacaaagtttgaagaagcaacattagcggaagctgatgcagttcctgatgccattgatccggcacaattcccagaacgtcgtgacctgcgggaacaattgattgtcacgatcgatggggcagatgcgaaagaccttgatgatgcggtcaccgttcgtaaattagccaacggcaactttttcttaggggtccatatcgcagatgtttcttattatgtgacagaaaacagtgccctagacaaggaagcttttgaacgaggcaccagtgtctatctgaccgatcgggtcattcctatgatccctcagcggctgtcaaatggtatctgctcactgaatcctcacgttccgcggttgacaatgagttgtgagatggaaatcgattcttcaggtaaagtgatcaaacatgagatttttcaaagcatcattcaaacaacagaacgaatgacttatcaagcagtaaatgaaatcttggaagaccaagagcctgagacaatggcgcgttatgcctcgcttgttccgatgtttaaggaaatggctgaattgcatcaaatcttagaagcgatgcgcgttcggcggggggcagtttcttttgaggatcgtgaagccaaagtattggttgacgaagcagggcatcctcaggacatccttcttcgcgaacgaggagttggcgaacgattgattgagtcctttatgctggctgctaatgaaacagtggcagagcatttcaacaaacgtcgattgccgttcatttatcggatccatgaagaaccaaaagaagaaaaaatgcggcgcttttttgattttgcttctgcgttaggaattgttgtcaagcagacaaaaggctccatcacgcccaaagatctacaaaaagtcgtggaagatgttgcagataaacctgaagcgatggtggtcaacaccatgctgttgcgaagtatgcaacaagcaaaatattctgaagataactatgggcattatggactggctgcagactactatacccacttcacatcaccgatccgccgataccccgatttgatcgttcatcggctgattcgttcatacagtacggatccgtcagaaagcaatcaagaaaagtgggagcagaaccttccagatattgctttacacagttcacaaatggagcgaagagcagtggaagcagaacgtgaagtagatgctcttaaaaaagctgaatttatggccgataaagtaggagaagagtttgacgggattattagctcagtagtaaaattcggacttttcgtggagttgccgaataccatcgaagggttaatccatattactgcattgaaacaagattacttccattacttggaaaaccacctcgcattagtaggtgaacgtactgggcaaacgtttaagatcggacaaaaagttcgcatcaaagtgatcaaagcggatccagagactcgcgaaatcgattttgaattgattgaagcagaagaagtcgtacgaatccaacagcctaaaaaaaagcaaaataaagaaaacaaacagcgaagacaaacctcagatcgacagaaaaaagaaaatttacggggaaaatctcctcgtaaaaagaaaaaaaacggaaattcaaaaaagaaacctttctataaaggaattaagaaaaagtaggagggatgaccgttgcctaagggagagggcagactaattgcccaaaacaaaaaagctcgtcatgactacacgatccttgatacgatcgaagcagggatcgtgctgcaagggactgagatcaaatcgatccgcaacagtcggatcaatctaaaagacggctttgttcgtatccgtaatggagaagcctatttgtataatgttcatataagtccctatgaacaggggaacatttttaatcatgatcctttgcgtacaagaaaattgttactgcataaaaagcagattgctcggttgatcggtgaaagtaaaaatacaggaatgaccattgttccgctaaaagtttatatcaaagatggttatgccaaagttttgatcggcttagccaaaggaaaacgcgaatatgacaagcgagaaaccctaaaacgaaaagatcaggaacggcaaattgatcgtgctcttagaaacttttaatcttctaagaagttcttttagaatcatttaaagtgtattgctttgagattagggaaaaatttggtagcatttaaggcaaaggtactgatgtaccaagcttttcatgaaatttcacgacagtgtttcaattaattttttttcgaattttggcagaaaaacttttttgtctaattttcttgaaaatactttgaaattttcttgtcgtggtggtatgataccgattgttatgagaggaaacgcattgtaacaccagatattttctggagatgacaggaaaagaggtgagaaagattggatgaaaaatcgcttatgtttcacatcggtccgatttggtttgatggaactgtagcaatgatgacaatcatttcttgtataattgtttttttggtggtgttcatttgtacacgaaatttgcaaatgaagccaaaagggaagcagaactttattgaatgggtcattgattttgttcgcggaatcgtagctgacaatataccaggatcgcaagtgaacaactttcatttgctgggtgtaacaatgtttctttttgtgtttgtggcgaatgaaattgggctggtcacaaagatcgtgacagctgatgatgtctctttatggaagagtcccacagcggatccttttgtcaccttgacacttgcacttatggttattagtttgacacatttctttggtatcaaaacgcttggtttcaaaaactttatgatcaattcttacttgaaaccagttggtttcttattaccattgaaaattatcgaagaatttacaaatgttattactttgggcttacggctttatgggaatatttttgctggagaggtcttgttagggttgatagcgaatatgttcacaagtctaggttggtggtcattgcctatcgcgatgccgcttgaaatgatttggattggcttctcattgtttataggcgccatccaagcctatgtatttgtcacattgaccatggtatttatgagccacaaaatcgtggcggaacactaatcaaaacaaacacttttaggaggaaaaacaatatgaatttcatcggagcaggattagcaattatcggagcagcaattggtgcaggttatggtaacggacaagtaatcgccaaaacgatcgaatcaatggcacgtcaacctgaaatgtcaggtcaattacgttcaacaatgtttatcggggtagcgctagtcgaagctgtgcctattttgggggtagttatcgcgttgctattagtcttccaaggctaaacgtgaaaaaggcagaaacgaacaatgcactcgtttttgcttttttaaatgagagaattactttcagaaaggaagagtcgttatgctaaatcacttggttctagcagaagtaaaaaatgctatgcttggcaatattattcttgtcagcggctcaattcttcttttgctattcttgttgaaacactttgcatgggatgccattagtagcatgatgcaaaaacgggaagaaaaaatcgccaatgatttggattcagcggaacaatcccgcttgaatgcagcgaaactggaaaaagaacgccaagaaaaattggccaattcccattcagaagctgcggagatcatcaaaagcgccaaagacagcggagaattgagtcgccaaaatattttgaacgagaccaaagaagaagtttctcgtttgaaagaaaaagctcactcagatatcacgcttgaaaaagaagctgcgttaaaagaagtcaaagatgatgttgcagatctttcacttcaaatcgcagaaaaaatcttgggccgtgaattgactcccgaaaatcatgaatctttaattaatcaatatatcgaaggattaggttcagtcaatgaaactcgataaatttactgtatgtaaacgctatggcaaggcgttgttcgaattggcgatggaagaacaacgagctgaagctgtttatcatgagttgatgacactacgtcagatttatcaagagattccgatgtttggccaaatcgtgaccgataatcgtttggattctcataaaaaaagaaaacttgttgatcagttatttaataactttgatggattagtcaaaaattttcttgagatcgtgtatgaatataatcgtatggacgacctattgctgatcattgatgagtatgaacgccgctatgacgagcagcaaggtttagtcaggggtacggtgaccacagcagttgcattgtcgtcaagtcaaaaagaacaattgtcgaaacaaatcgcacagacgctcggctaccagaaagcagtgctttcagaaaaagttgatccaaccattttaggtggagtcatcgtggaagccaatcatcaagtgatcgacggtagtattaagagccaactggattatctgcgacaacagatcggcagataaacaagagataagaggtgaatcggatggccatcaaagcagaagaaataagtgccttgatcaaagaacaaatcaaaaattatcaaaatgaactttctgtagaagaaattggaacagtcacatacgtaggggatgggatcgcccgggctcacggattagaaaatgcgatgagtggagaattgcttgagttttcaaacggttcttacggtatggcccaaaacttggaatccaacgatgtagggatcatcatcttaggtgaatttgaatccattcgtgaaggtgacaaagtaaaacgtactggaaaaatcatggaagttcctgttggggatgccttgattggacgagtagtgaatccgttaggacaaccaatcgatggcttaggtccaatcgatacagataaatctcgtccggtagaagcagctgcacctggtgttatgcaacgtaaatccgtttcagaaccaatgcagactggattgaaagccattgatgctttagttccaatcggacgcggacaacgtgaattggtcattggtgaccgtaaaacagggaagacaaccatcgcaatcgatacgatcatcaaccaaaaaggtcaaaatatgatctgtatttatgtagcgatcggtcaaaaagattccacggttcgtgcacaagtagaaacattgcgccgttatggtgcgcttgactatacgatcgtggtatcagccggtgcttctcaacctgcaccactattatatatcgccccttatgctggagcagcaatgggtgaagaattcatgtataacggtaaacacgttttgatcgtttttgatgatttatcaaaacaagccgttgcttatcgggaactttccttactacttcgtcgtccgccaggtcgtgaagcttacccaggggacgttttctacttgcattctcgcttattggaacgggctgcaaaattaagtgatgaactaggcggaggctcaatgactgccttgccattcgttgaaacccaagcaggagatatctctgcttatattccaaccaacgtgatctccattacagacggacaaattttcttagaaaatgacctgttttattcaggtgttcgccctgctgtagctgccggactttccgtttcacgggttgggggttctgcacaaatcaaagcgatgaagaaagtggctggaacattgcgtttggacttggcaagttaccgcgagttagaagccttcacgcaatttggttctgatttagatgccgctactcaagcaaaattgaatcgtggacgtcggactgttgaaattttgaaacaaaaactgcatgaaccattagcagttgaaaaacaagtggttattttatacgcattgacgcacggattccttgacagtgtgccagtaaataaagtattagactttgaagcagaattgtttgaatacattgaagcaaatcaagcagatgtgtttgaaacgattcgtgcaacgaaagacttgccagaagaaagcttattagatgacacaatcaaagcattcaaagatattttcatggctgcaaatacatcacgtgtttcagcacaagacaaaatgtcaacaatgcaaaatgcataaaagaggtgagaatgaatggctgcttcattaaatgagatcaagcaacgaattgcctcaaccaagaaaaccagtcagatcacaaacgccatgcaaatggtttcggctgctaaattgactaaatcagaagcacactcaaaacaatttcaagtctatgcaacgaaagtgcgtgagatcgttactcaccttactgcgcaacaactctcagatcttgcagctgctggacctaaagagggcgtcaattacaacagtatgcttgttagtcgtcctgtaaagcgcactggctatatcgtcattacttcagatggcggtttagtcggtggctacaacagttcgattttgaaacaaatgatgacgatgctggacgaagatcatgctcaagatgaagaatatgttatgatcgccatcggtgcgacaggagcagatttctttaaaacacgaggaatcaagttagcttatgagttgagaaatctttccgatcagccaagttttgacgaagtgcgtaaaattgttaccttagctacaacgatgtatcaaaatgaagtatttgatgaactatatgtttgttataaccatcacatcaattcgttgacgagccaatttcgcgtggaaaaaatgctgcctatctcagatttggatccagaagaagcagaaagctatgaacaagagtatttgtttgagccttcaagagaagcaattttggatcagttgttgccgcaatatgctgaaagcttgatttatggtgccattgtcgatgccaaaacagcagagcatgctgctggaatgactgcgatgaagacggcaacagataatgccaaaaatattattggggatttgacgatttcttataaccgggcgcgtcaaggagcaatcacccaagaaattactgaaattgttgcgggggcatccgcgttagaataatttcgagaacgaatggaggaatacgaatgagttcaggcaagattgttcaagtcattggtcccgttgtcgacgtggaattctctctagaccaatccttaccagatatcaacaatgcgtttatcgtttacaaaaaagacgagaaaaaaacaaaagtagtattggaagccgctttagaactaggggatggtgtgatccgcaccatcgcaatggaatctacagacggtttgcaacgaggaatggaagtcatcgatacaggtgcctcaatctctgtccctgtaggaacagatactctaggccgagtatttaatgtactaggcgatactatcgacttggaagcaccattcccagaagatgccaaacgtagtggtatccacaaaaaagccccagatttcgatgaattgtcaacaagtacagaaatccttgaaactgggatcaaagttatcgatttattagctccttacttaaaaggtggtaaagtcggcttgttcggtggtgccggtgttggtaaaaccgtattgattcaagaattgattcacaatatcgctcaagagcatgggggaatttcagtatttaccggtgttggcgagcggacgcgtgaaggtaatgacttgtattatgaaatgaaagaatcaggcgttatcgaaaagacagccatggttttcggtcaaatgaatgaaccaccaggtgcccggatgcgggttgctttgactggtttgaccattgctgagtatttccgtgacgttgaaggtcaagatgtgctcttgtttatcgataatattttccgtttcacacaagcgggttctgaagtatcggccttgttaggccggatgccatcagccgttggttaccaaccaactctagcaactgaaatgggtcaattacaagaacggatcacctcgacaaaaaaaggttccgttacatcgatccaagccatctatgtgccagccgatgactatactgaccctgccccagcaacagcattcgcccatttggatgccacaacaaacttggaacgtaaattgactgagcaagggatttatccagcggtcgatccattggcttcatcatctagtgcattagcacctgaaatcgtaggggaaaaacactatgaagtagcaaccgaggttcagcatgcgttgcaacgttatcgtgagctgcaagatatcattgcgatcttagggatggatgaattgtcagatgaagaaaagactctcgtagcgcgtgcgcgtcgaatccaattcttcttatcacaaaacttccacgtagcggaacaatttacaggacaaccaggttcttatgtgccagttgaagaaaccatcaaaggatttgctgagattttagaaggtaaatacgatgatcttcctgaagaagccttccgaagtgtaggtcgaatcgaagatgtaattgaaaaagcaaaagcactaggttattaataagcaaccatagagaaagaggggaacctcatggatcaatttttaacggttaatgtggtgacacctgctggtttggtgtatgaacaccatgccaaaatcgtggttgcacgaacgacagatggagaaatcgggatcttaccgcaacacgcgccgatcatcgtgcctttggctatcgatgaagttcgagtgaaacggatcgattccgatactcacgtcgattggatcgctgtcaatggcggaatcatggaagtgcgggacaatgtagtttcaattgtagccgatagtgctgaacgtgatcgtgatatcgatgtttctcgtgctgaacgtgccaaacagcgtgccgaaaagcaaatcgaagaagcaaaacaagtggaagatatcgaccaattacgacgtgcgactgttgctttgcatcgtgcaatcaatcgaatcaatgtgtcaaaacattcctaagcgaagaccagtggtctttgcttttttttatctcaaaaacgttttaaagtctttttaaagtcttccaatgaaagtttcaagaaagaatattttggctcttttaaattttgtggtatgatagtaacgttcagatgtgaaaaggagaatcgaggatgcaagtttatggagtagatgcgattattcgtatcgtcagtcatttagcatttatctatttagcgttttgggcgttgcagtctttgcggatcgatgctttttttaaagccttacaaacgacgcaaatacggatggtcatggtctttttagcaattgctttaggctatactgctagcacttttttccttgaactgattgcattatgccgtaatttatttttaataggtttttaagaaattcaataatacatgcaggttgtgcgattgtatgctataattgtcaagattttgtgtatgattcaactgcattatttggagggaacaaaatggaagagattatcgttcaaggtggtaatcgtttaattggaactgtcaaggttgaaggtgcaaagaatgccgttttacctattttagcagcaagtttgttagcagaagaaggaacaacgactttagagaatgtaccgattttatctgatgttttgacaatgaatgaagtgatccgtcatttaaacgtcgagattgcttttgatcaatcaaaaaataccattacaatggatgcttcccgcgaattagctattgaagcaccgtatgaatatgttagtcaaatgcgtgcatcaatcgttgttatgggacctttattagccagaaatggtcatgcgaaagttgcaatgccaggaggttgtgctattggcaaacgaccaattgatctgcatctcaaaggattccaagctctgggagctgaaattattcaaaaagatggctacatagaagcgattgctagtgagttaaaaggaaatacgatctaccttgattttccgagtgtaggcgctactcaaaacatcatgatggcagcagtcaaagccaaaggaacgacgatcattgagaacgtcgctcgagagcctgaaatcgtagatttagcgaacattttaaataaaatgggcgcaaaagtctttggtgctgggacagaaaccatgcgcattgaaggcgtcgaccatttgcatgcggtctctcatgcgatcgtacaagaccgtattgaagcaggaactttcatggtagctgctgcaatgacagaaggcgatgtgattatcaaagatgcaatttctgaacacaatcgtccactgatttcaaaattaactgaaatgggtgctaaaatcactgaagttccagaagggattcgggtagttggacctaaaacaatcaaagcaactgatgtaaaaacgatgcctcatccaggtttcccaacagatatgcaagcgcaaatgacggcgattcaaatgttggctgatgggactagcatcgtgaatgaaacggtttttgaaaatcgcttccaacatttagaagaaatgcgccgtatgaacggtcatgttaaaattgacggaaacatcgctgtgatcgaaggcggccacgaattacaaggcgcgctagtttatgcaacggatctacgagcggcagcagctttgattttattaggcttgcgttcaaacggattgactcgtgtccgtaatctgaagtatcttgaccgtggctattataaattccacgaaaaattgcaacagttaggtgcttctgttgagcgggtaacaacttctgaaaaaacagcaccagtaaccgtttaaagaggagatgcgaccttgaagcttaatcgatatattttaactagtttggtaaaaattttgttggttatcttattggcgatcctgctctttattgccggcactatgatcggctatggtatcattggagacggtatgccgttaaaagtgttctcgcctcatctatggaaccatatattggacttcatgaagtaaacaaagctgaaactagaatggagcacattgctttattctagtttttttcaattctataaatagaagagagaggagtatgagatgtgagcaagcttttgattggatttgttcggctgtatcagcgattcatctctcccttatttccccctagctgtcgctattatcctacgtgttcgtcctatatgattcaggcgatccaagtacatggggcaggtaaaggaagtttgatgggaatctcgcgaattttacgttgtcatccgtttgtaaaagggggaatcgactacgtacctcagcgctttacactaaaacgaaatacccaagatcaggagcagcctacttatcactatcgcaaaaaataaacccttcaaactgcaggggtaggcaggaatgaacggagtaaaggagcaaaacgatgattcgagctttatcaccaaaagaatctttgccatggccgctattactggatgctgatccagaaaaagaagcggtagatcgatacatacaagccagtgagattcttgtttttgaaaatgagcagcagatcgtaggagtgattgtttatcaactgcaaacagcaggatgggaaatcatgaatgttgctgttgcaccggaagcacagaatcaaggaatcggtggtcgtttactgaccgcagcgttaagtaagattgctgcaacaaaaactacggaaactctttgtgtaactatcaaaactggtaatcttccttccgcagcgttaacactttataaaaaaatgggtttcattgaaaaaaaagtagtcaaaaactattttgtcgatcattacaaagagcccatttatgagaacggcattctacttactgatcaagtgattttagagaaaattctctaaaaagcatctcgcgcactttgacttcatttgaaaaatgggttttgtccgccattcatgttactctgaatcaaatcatttagagcgcgttattgtccttttcaacgaaatcaacagaaatcgctttcttaactgaggaaagtacagtaaaataagggagacaactgagtgagaaaggaatgttgagatgacattactagtatttgatatgggcggttctgcagtgaaatatggattatggcaggacgaacaattaagtgacaaaggacaatttgcgacgcctgatacttggcaaaaaatgaaagaagagctcaaagcaattcgagatagcattaaaaaacctcttgaaggcgttggcattagtgcgccaggagcggtgaatgttgcacagcagcagatcaatgggatcagcgccattccatatattcacggatttaatattttcgctgaattggaagcgttatttcaattgccagtcactattgagaatgatgccaattgtgccggaatggcagaattttatcaaggcgctgggaaagattttgacacggcagcattcatcgtgattggtactggggtcggcggagcactttttcaacaaggaaaactgatcaaaggcgcccatctttacggcggcgagtttggtttgatggttcttgataaaggcaaatctttttcgcagttagggacggctgttcaaatggcttggcgttattgtgaccgaatcggtgtggaccgcaaaacgatcagtggcgaggaagtctttcgtcgagcagaagaaggtgatattatcgccaaagaagaggtagacaaattttatcgctatttgactgaagggttattcagcatccaatttgcttttgaccctgaagtattgattattggtggcggagtcagtgcaaaagcaggattgttgccagaaatcaatcaacgaatgaagaaaatgctggcagcacaagacttaaatgactttgttccactgattaagctttgtgactatcgaaatgatgccaatctagttggagcggcagctaatttcaccgcacaagtgctgaattgattcagctcattgttgctgccattttttcaattttaaacataaaccttgaatcaacagatacacaagttgtgatcactttggaagagtggtcacaactatttttttcggaaatcgattacaatcgcgacgcatcaatctttattttttttaaaataatttaaagtatctgaataaagaaaatattctgataattcgttgacattttccctattattaagtatatttgataacatatccatgggagtaggggaggaataatgatgaaaaagaaatttgcatttttatttgctagtttatttttattatcggcttgtagtgcgggaccaactggtggttccactagcggtagcggttctgctagcggtggcaacaaacaagaaggtgatacgatcaaaattggtgtcaatttagaattatcgggtgctgttgcagcttatggaacggcggaaaaagaaggaattgatctggcggttgaagaaatcaatgagagtggcggtatcttaggaaaacaaattgaaattgtttcaaaagataacaaatctgacaataatgagtcagcgacagtcgcagccaatttaacgaccaatgataaagtagtagcaatgatcggaccagcaacttcaggtgcgacgaaggcggcattgccaaatgtcaccaaagcacaagttccgttagtgacaccttccggaacagatgatgcgattactgtcagcagtgacaaagttcaaggatttgctttccgttcttgtttccaagacagtttccaaggaacgatcttagcaaaatatgctgcagacaacttggatgctaaaaaagcaattattttaggcgataattccagcgactatgcgaatggattatcagcagcctttaaagatagctacaatggcgacattgtactcgaagagaatttcacagaaggtgacaaagatttccaagcggtgttgacgaaaatcaaaaatgctgactttgatgtattgttcattcctggctactacaccgaagctggtttgattatcaagcaagcccgagaattaggaatcgatcagccaattattggtgcggatggctttggtgatgaaaaaatggtccaaacagcaggcgcggaaaatgtatcggatgtttattatacaggacacttctcaactaaagctcctgccaatgacaaggtagaaccttttgtcgaagcattcaaagcaaagtatagcaaagaaccttccgcatttaatgcattggcatacgacgctgtctacatgatcaaacaagccattgaagatcaagattcagcagactcaactgcgattgctgaaggactatctgctttgaaaaacttccaaggtgtgacgggagagatcaccatggacaaaaatcataatccagaaaaatcagcagttgtattaggactaactgaaggtaaagaaacgtcagctgatacagtaaatccttaaatagaaggaccgttctttacacgatcaaatagggactgagacaaagtcgaaggtaagcgaacaaaatgatgaacgataaatgaaaaagtcgtaaatctgtgatcctatcaatcatggcagatactcatttgactcgttgctgcagacttctgtcgcggttcctttttcttagacaagtatcaagaatttaaggtattggaagtgaaaacatggaaatgatgatccaacaactaatcaacggtttatttctaggtagtatctatgccttattagcgttaggctacacgatggtttacggcatcattaaactgatcaactttgctcatggtgaagtgtatatgatcggcagttttattggttattttttgatcaatcaatggaatctgggcttttttcctgcactattcatctcaatgattgctagtgcagcgttaggcgtgacgatcgagtttctggcctatcgcccactccggaattccacccggatctcggctttgatcaccgctatcggtgtttcctatttattgcaaaatgtcatgatttttttcttttcaccagatgtccgaccatttccacaagccattgcccgcaaaacttatagtattggttttgtggaggtaagtaacatacaattattgattttagcagtctcattggcgttaatgatccttttacagctaatcgtcaagaaaaccagaatgggaaaagcgatgcgtgctgttagcgtggatgcggatgccgcacggttgatggggatcaatgtcaatcggacgatttccttcacatttgctcttggttctgcgttggcagctgctggtgggatgttaattggattgtattacaattcgatcgatcctacgatgggggttgtgccgggactaaaatcttttgttgcggctgtattaggcggtatagggatcattcctggggcagcattaggtggcttcgtgatcggactaattgaaacagttgctactgcattaggtttttctgattataaagatgctttagtctatgtcattttaataattatattgttggtccgtccggcaggaatattgggcaagaacctgaaagagaaagtgtaggtgtcagtgatgaaaaagaatttgaaatacaacattacttggttagcactcgccgctgttatctacttcggtttgtttgcagcttataacggcggattgatcaatctattttcagacgcgattatcgtcaatatcggaatcaatattattttagcagtagggctaaatttaattattggtttttcgggacaattttctttaggtcatgcaggttttatggcgattggtgcttacgcaggggcaattttaacagccaacaatcctacatttggcggatttctttctggtcttatcgtggggatgttcgtttcagggctgatcgcactagttgtcgggattccaacattgcgcttgaaaggagactacttagcgattgcaacgttaggtgtttcagagattatccgtatcttattagtcaatttacgaggattgacgaatggacctgcagggatattcgggttaccgcaattcagtaattggcaaatcgtctttctttttgctgtcggctccatcttggtggtctctaattttatccatagtggaccaggacgagcaacattagcgatacgagaagatgagatcgctgcggaagcaatgggggtcaatacaacgaaatacaaagtgattgcttttgtgatgggtgctgtcatggctagtattgccggtacattatatgcaagttatcaacaatcggtatttccgaaagattatggctttatgaaatcgatcgatgtcttgatcatcgttgtgtttggcgggatcggtagtacgacaggagcagtggtttcagcggtcgtattaggtatattgaatatgtacttacaaggcttctcagatttgcgcatgattatttacgcactggcattgatcgccattatgattttcaagccaagtggacttttgggaacttgggaattttctgtgaagcgcatctttgataaatttataaaaaagggggatgacacgaatgcctctattggaagttaagaagctgactaagaactttggtggtttggcggcagtttcacatgtcgatttacatttagaaactaatgaactagttggcctgattggtccgaatggtgcagggaaaacgacactcttcaatctgctgacaggcgtctatgaaccaagtgaaggcgacgttcttttagaagaacaaggacaatccaagcgattgaatggggagaagccctatcttatcgcagctatgggattatcccgcaccttccaaaacattcggttgttcaaagatcttacagtgatggacaatgttctgattgccatgaacagcaaacaaaaagaaggcttttttacgagtgtgttgcggttgccaaagttttatcacaaagaggctgcaatgaaagagaaagtcatggaattattgcgtatctttgacttagaaaataaaagccaaacactagcaaaaaatcttccttacggtgaacaacgacgtcttgagatcgttcgggcattggctactgaaccaaagatcctttttcttgatgagccagccgccgggatgaaccctcaggaaacagcggaactgactaaattgatctaccgtatccaaaaagactttcaactgacgattttattgatcgaacatgacatgagtttagtcatggaggtttgtgaacgcatctatgtactggaatatgggcaagtgattgctcatggaaagccagaagagatcaaaaatgatccgcgagtgatcgaagcctatttaggaggggaactctaatgctgcgtattgaaaatttaagtgtccattacggcatgatccaagcggttcatgatgtttcctttgaagtcaatcaaggagagatcgtctcgttgatcggtgccaatggtgcagggaaaacgacgattttgcggacgatttccggtctgatccgaccctctaaaggcacgattctctttgaaggcaaacccatccaaaaagaagctccacaaaaaatcgttgctaatggattatcacaagtacctgaaggacgtcacgtttttccaggactctccgttcaagaaaaccttgagatgggcgcttttttgcgaaaagacaatcaagtcaaagaggactatcagcaggtcttcacgaaatttcctgtcctaaaagaacgactaagtcaagatgcttcaacgttatcaggaggagaacagcagatgttggcaatgggacgtgcactgatgtccaagcctcggttgcttttactcgatgaaccatccatgggcctagccccaatattcatcaaagagatcttctcgattatccaagaaatcaaacagcaaggaacgaccgttttattgattgagcagaatgccaaaatggctttgtccattgctgaccgcgggtatgttctagagactggcaaaatcgtcttgcaaggaagcgggcaagagttattggaaagtgatgaagtcaagaaagcctatctaggtggttaatagcttacaacaaggaggatgaaaaatgagtgtacgtgattttatgaccaagaatgtcatcactgttcattcggcaatgccaatatttgatgcgatagacttaatgaaaaaacatgacatccatcgattgccggttgttgatcagcaaaggttagttggcctgattacagaaggcacgattgcagaagcaatgccttcaaaagcgacaagtttaagtgtttatgaaatgaattatttattaaacaaaacgactgtagcagatatcatgctgaagaaagtgaccaccatcaaaccggaggcgctgctagaagacgcgattgcagtcatgcgggaagaaaatgtcggtgtgttgcctgttttagcagatgacgaactagtagggatcattacgaataatgatatctttgatgctttcttgaagatcacaggttactatgagggcggtacaagagtagctcttgagattattgatgaccacagcggtgtcttagcggaaatcacgcagttattaacagatcatcaattaagtattttaacgatcgtggtcaaccgaatggctttgaaaacgatcgtagagattcaagttgaatccagacaagtgtcagaaatcgagaaaatttttgccaatgctgggtatacggtattgagtgcggtattgaccaatcaaaaataagcaaaaatcatgcaaacacaatcagtgattgcatgatttttttctggatgaatggttgactagatttgcttttgctttgcggtgttttctggtagaataaacaaggtatctgaaagaggtgagtatgatgtcgaaaaaaaataaagatattgaagtccgtgtggaagaaaccgttaaggtgatccaaggaaaagaatatgaagtccatcaactagtattagggaaaaaagtgattggtgaaattctcgcatccggtccgaaagaattccaaagctttctgggcgaagaagatttaggtgcaagccgaactttggatgcagcaattgaaacgattttgcgccaatggaacttacatgaataatttcttaaaaaaaatgacattttgctcttgcaatttgttatatttttaggtattataactgagtcaggttttttaaaagccgtttggaggagtagcgaagtggctaaacgcgacggactgtaaatccgttccttcgggttcagtggttcgaatccactctcctccaccattggggtatagccaagcggtaaggcaacggactttgactccgtcatgcgttggttcgaatccagctaccccagtcagtgaacaatcaagaaaagtcagcaagcatgtcttgctgacttttcttcgttatttatagcaaaattctaagggttaaaagttgaagattttttttatttacgataggctataggtaaataactcaggagatgagaagatgaaatttaaattgaatctaaaagaaaaagtcaccgaagcagctgagcatgtgtatgatgttgtcaaacgtgaagattatgctattcgtattgcaccaaaaggtatcaaagttacacaattgcgtaaaacaaaagatacgatcaaatggcgttcaaagaatcattgattgcgaaaagacattgagtaaaacagcccaataacaaataaaccggacaagagttgtcacccgtttcacgttttcctgatttctgagaggaagtactgggggaagcaactctggttcggttttttgatttatacgatatactctccttctcgtatgttacccttcgatttcgataccgagaacggttaagtgtccattggcgactaatttaatgaccagtttagctagttggtcaggagtcatttgactatcggcagtaagccaccagtgcagagtaccaacaaaaatcgatgtcatatattcaataacgaaatccagcggtacttcgatggagctttctgtaatttttaattttgaaaaaatatggtcatattgttcatagagaatctccgcgattcgttgccggactaattcgatggctgcgccatccatgatggtcagataaaaaaagcgattgtcctgaatgtgctgatagatttttgtcatcgcaagttcgactcgtttgatcttgattcgatttccctggactaaatcttcaagggacaaaatcgaagtaaaggagtcgattgccatatcaaaaattttttcatataaatcttgtttgtctttataatgagcatagaatgtcgcacgattgatcatggcttcgtcggcaatatcttggacagtcacttgatcgtagcctttatgctctacgagtcggataaaagcctccatgatatgtttattcgtgcgttgaacccgcaaatcaacttttttcatttttgtgaacttcctctcaatttaaacgacatttttaccgttcctgttgcttatcccacacatcacatgaatctgtttgttgaaatctcaatagattgttcttaaaatagacataagtattataacaaacagtttgtaagataatcaacaaagtgttggataaagcggaggcaccctatgaaaaaattaagtgctggtatcgatgtaggatcgacgactgtcaaaatggtggtcttgaatgaaaaaaagcagaccctctttgccaagtatgaacgccactattcggatatcaaaactgccacaaaaaaagttttactggaagctcaggaagtcatcggtaatcaacaggtcgcactagcaatcactggctctggagggatgggactggccgaagttttagcgatccctttcgtgcaagaggtcattgcctgtactaaaacagttgagacactgattcctgaaacaaatgttgccattgaattagggggagaagatgccaaaatcaccttttttgaaggggcgttggaacaacgaatgaatggtagctgtgcaggtgggacgggtgcgtttatcgatcaaatggcggtattgttgaaaaccgatgctaatggtgtaaatgatttagcgaaaaattatcaaacgatctatcctatcgcttcccgttgcggggtattcgcaaaaacagatgtgcaacctttgatcaatgaaggagcagataaagccgacatcgccgccagtatttttcaagcagtggtcaatcagacgattgcagggttagctgctggtcgtaaaatcaaggggaaagtggcttttttaggtggccccctttatttcatgtctgaactacggcgccgctttgtggagacactgcaaattgctgaagaagacattatttttccagaaaatccccagctgtttgttgcgatcggcgccgctttatatggagaagaaacagctcaactcaatacattattagcccggttatcaaccgatgattcagcgaaattgcaaccgtctcacacattggcgccgctatttgctacggaagaagagctcgcagtttttagacagcgtcatggccaatcttcggtggaagaaaaaaaacttgcttctcatacaggagcagcctttctcggtatcgatgcgggttcaacgacaacgaaagtcgtattgatcgacgaagtgggtaggattctttactctttttatggcaacaatgaagggcagccattggaaaccaccatgcgggtattacaggaaatgtatcagcagatgccaccagctgtgttcatcgggaaagctgcggtcacaggatatggagaacagttgatcaaaaatgcactgaaaattgacattggtgaagttgaaacgatggctcattataaagccgccgaacatttccaaccgggggtcgattttattttagacattggcgggcaggatatgaaggccatgactatcaaagatggtgcactctcttcgatccagctgaatgaagcttgttcctcaggctgcgggtcctttattgaaacctttgcgcgttcgctgaaatacgaagtcaaagaatttgcgttagcagccactactgccaagaatccagtcgatcttggttctcgctgtacggtattcatgaattcaaaagtgaaacaagtccaaaaagaaggtgcatctgtcggggatatttctgcgggtctatcctattctgtgatcaaaaatgccttgtataaagtgatcaaaattcgtcgcccagaagatctaggtgagaaaatcgtctgccaaggaggaactttttataatgaggcggtgttacgagcctttgaaaaaatcagcggcagggaagtcgtgcggccgtcaattgctggcttgatgggggcttatggtgcagcactgatcgcgttagaaaattacgagattggtgaagtcacagccttgctttcaagtgatgaattgagtcaatttactgctgaaaaagaattcactcattgcgggttatgtgaaaataattgtatgctgactgtcactttattctcggatggacgcaaatttattaccggaaatcgctgcgagcggggtgcccgcatcaaaatcaaaaaagaagagcgcaagataaatttagtcgattacaaataccgccgcttgtttaagtatcgcccgcttcgcaaaaaagaagcgtctcgtgggcgtatcggcattcctcgtgtattgaatctatatgaaaactatccgttatggcatactttttttacagaactgggctttcgcgttgaattgtccccacgatcaaacaaagaattgtatgagaaaggtatcgagacgattccaagtgataccgcttgttatccggccaaaatcgctcatggacatattcaagcgttgatcgaccaaggggtcccattgattttttatccaggaattatttttgaaagaccagaaacagcgcaggctgagaatcatttcaactgtcccatcgtacaaagctacccagatgttattcgcaacaatctggatgatatccgtgctggccgtgtggattatcgtaacccgtttctaaatttggcagacgaaacttcaatggtcaaagtgttgtcagaagaatttcaagattttggtatcactgagacagagatcgcgcacgcattgcggcttggttttgaagaattggatcaatttaagctagatgtttgtcagcaaggggaaaaaaccttacggatgctgaccgaaaccaatcagcgaggcatcgtactttctggcagaccctatcatttggatccggagatcaatcatgggatcgcggaagtgattacccaagagggctttcatgtattaacagaagatagcattgcgcatttgggaaatgtcggtcatttacgggtcgttaatcagtgggtttaccattctcgtttatatgccgcagcacgggtcgtcgctaaaagcaagcagttggaattggtccaactaaactcatttggttgtggaatcgacgccgtcacaacagatcaagtagaagagattatggaacaatatggcaaattgtacactgtattgaaaatcgatgaaggggctaatttaggcgccattcggatccgtttacgttctcttaaggcagctgtcaatgaaagggagaaaaaccattttattcctactcaacgttttgaagaaccagccaagatcacatttactaaagaaatgcgtaaacaacatactttgttattacccatgctaagcccaatccatcaaagcgggttagtcgatgtggcactgcaagcttcgggatacaatgtgatctgcttgccggcggatgatcgagaagcagtcaatgtgggcctgcgtttcgtaaataacgatgcttgctatccagccattatttccatcggtcaattgatcgaagcactccaaagtggaaaatatgacttgcaaaacactagcgtattgatgacacaaacgggcgggggatgtcgggcaaccaattatatccctctgctgcgtaaagcattgaacgaggcggggtttccacaagttcccgtcgtttcggtctccatgggaaatcaaggcgtggagtcaaatcctggctttaagtttacattaccaatgctcaaacgcgtggctgttgcatttttgtatggagatttatttgaacgagttgtttatcgaacgcggccttatgaagccatctctggttctgtagatcggcttcatgaaacgtggcttaaaaaagttgaaaaaaatgtacgcaacggttcttttactttgttcaaccacaacatgaaaaaaatcattgccgattttgatacgattgatctgcaggacatcgtgaaaccaagagtcggtgtggtaggcgagattttagtgaaatactctcctacagcgaataacgatatcgtgagacttttggaagcagaaggggcggaagcggtagtaccagacatggttggttttatgaattattcgctttataatcagatttggcgctatcaaaacctaggaatggccaaaaaaagcaaatggatcgctgaatttgccattggattaatcgaacggatccaaaaaccgatggaccgtgcgttgcgggcttctcagcgatttgaaggattacactcgatttatcaattagcagatgatgctagcaaaatcttatctattggtaatcatacgggtgaagggtggtttttgactggtgaaatgattgatctattgaaatctgatgtgactaatatcgtttgcatgcagccttttggttgtttgccaaatcatgtggtcggtaagggtgtaatcaaagaactgcggcaccaatatcctaaagccaatattgctgcgattgattatgatcctggagtctccatggtcaatcaattgaatcggattcgtttaatgttggcaacggccaataaagctttgcaaagcagcaactaacattcagcgctttaactatccaataagactgtaccaatttgagggaactttttttcttattttgtcttttgtaagaagaacagaatgaaaaaaaggatttttcccttaaattgacagtctttttagttttttcattggttatttaggtatataccagttataatagaaactgaatggaggaatagactatggcagagaacttacccgtatacatacagatacatgatcaaatcaaagcaaacatcgagaatgaaacctacaaaatcggtgaccgtttgccttctgagcgcgaattagcgaaacaattcggtgttagtcgcatgacattgcgccaagctattcagacactagccgatgaagggattttggaaagaaaaatcggatcaggaacttatgtggctcgtcagaaagtacaggagaaaatgagcggaaccacgagttttactgagatcatgcgctcacttggacgggtgccttctagtaaagcagtggcctacttcttgacagccccaagttcgagtgaaatggaaaaattgcaattagaaggacatgagacgattttacggatggaacgcattcgttatgcagatgatgtacctatttgtttcgaagtggcgagtattccagagaaattgatttacaattttagtaaagaagaaatcatctcatctttgtatcatgtgttagaagaaaagggcggtcataagatcggagctgcctcacaaacgatctcagcaatgattgcttcggagcaaatcgctgattacttgcaaatcaaacgcggggatgcaattttaagaatgcggcaaattacctgttttgaaaacggacaaccatttgaatacgtgcgtacacaatacgtagggaatcgttttgaattttatttagaaaaataagataggaaatagaaaattatattgaccaaaatgaaagacaaaagtgaaagctagtaaacgaggtgaaagagtagcaagaattgtcagaaatgatgcctcaagcagattcatgaggcatcgcttgacagtagctatctgaacaatcattctgcttcaccagcaagtaatgacaacacaaattcgatctgtttctcaggaaatcggtcgttccacatagctgacagggccgtgtgcgatctctagttgtccttgtaacagatctgttagatcggcttctaccgcggacaaggatatttcgggaaccatcagcgttactcggattttatccgtatagtcaatggatgctaagtgaatgttttggtgctctaagtgattttgcagctttcctagctgaggataatcgatggtcaaataaagtgtctggttaagtgtcccttcaacgataccgatttcctttaaggcagcggcaacagtgcttgcataagcgcggatcaaaccgccagcgcctaatttcgtcccaccaaagtaacgggtcacaacagcaaccacattgattaattcattttttttgaggacatctagcatggggacaccagcggtaccgcttggttccccatcgtcgctgcttcgttggatctcattgttctcgccaataacaaaagcactgcaattatgattagccttccaatgctcttttttgagagcgaggatgaatgctttggcttcctcttcggaagtgacacgtttaagggaacaaatgaatcgggatttcttgatttcttgttcactttgtccatcctcacgaatggtgcgataactattcttcataggctcctccttttattttcagtataggtaatgtggagaaaagtttcaatgaaagaaatcagtaaagaataagtgaacggataaaaaaggaggcgttgccattgagtaaacgcaagaaatacgatatcatcactcattacttaaaatctaatggcggttctcaagtcacattgactttcacacaatttgatgaactgttatttccggcgacagggctgccaaagagtgcccgcaagagcattgattggtgggccaatgattatcgacatccggaaaacggtgcctatgcgtggttgaatgcaagatatgaagtggttcacgtgaatttaaagaaggaatatgttgttttcaatcaattggtcaagtccaattggttaatagacagtaagcgttgacaaatttgaaacttgttctatactaggaataggtaatgttatattatttaaaattttagggagtgttcgatatggctaaaaaaacgattatgttagtttgttccgcaggaatgagcaccagcttattagtgacaaaaatgcagaaagctgctgatgcaaaaggtcttgatacagatatttttgctgtttccgcttcagaagcagatcaacatttagaaagcaaagatgtgaacgttttattattaggccctcaagttcgtttcatgaaaggcgattttgaaaaacgtttagcaccaaagggaatcccattggaagttatcaacatggctgactatggtatgatgaatggtgaaaaagtgttggatcaagcattgacattgattggtgaataagcccaatccattttcaacgattacttaagactattgagtagaaccttacaggtttcgaatttctctgttttggcagaaaatgagaacgagtaaggttctttttttgtggatggcgtactttaattgtgtcgaatgtccaaggctttcgaaaaaactagcgaatgtacctgcttttgaaggcttgatcagtcatatataacgagaggagggatacgatggaagaaggcggtcgtcaaattttagtatccgaaagggaacgcaacaactccgaccaactcaaaggtgacattcgtccagccgtcttaatcaaagagggacaaattgaatgtcagcgttgtggcagctgcttcaataaagaggaggtacaactgccaacagggattcactattgccctgcctgcatccattacggacgggcagatacgtctaaagtttttgtgacagtttcggaacaaagcagcgtcagttttccgaaaattcattggcctggtccactaacggtttttcaaaaaagaatctcacaagcgttggtaagaaattatcaacaaaaaaaagcaacgttggtttggtcggtaaccggctctggcaaaacggaaatgatttttgaagtgatacaagcggcaaggctgcaaggacatcgggtagctgtcgtctctccgcgaatcgatgtgtgccgcgaactgttccctcggatccaacaggcatttcccaaagaatcttgtttactgctttacggagattcagaggaagactatcggtatacagacttgcttgtggcgaccattcatcaactgctgcatttttatcgggcatttgatctgataatcgttgacgaagtagatgcttttccttatgaaggggaccagcaactaaggttcgggttaatgaatgcactgaaagcgaccggctgtctgatttatctaagtgccacaccttcagatgcgttactaaaagaaacaacaaattttgcagtggaaaaaatgccgctgcgttttcatcagcgaccgctgatcgttcctcaactgatttggtatgaaggttggcgtaacgtgtatcaaacaaaaagaagactacggcgcttattgtttcatctgcaacgcctatctcaaacaaattttgtcttagttttttgcccaagtattgtttttatggaacggctagaaaaagctgttcgatcattcttaaaagaggagacgataaccagtgtttcagcaaaagaccctgctcgaatagaaaaagtagtcaaggcgcgcaattcaaagtatcagattcttttcacaactaccatcttggaacgaggtgttacctttgaaaatgtttctgtagtggtgatgggagcagatcatcctgttttttctaaatcagcactggtccagattgctggacgagttgatcgaaaaggtccattcaatcatggagaagttctctttttctatgatcaagcaacatcagcgattcgtaaggcgatcttggaaatccaagcgatgaatcgattagcaaaggagtggctggcaagtgaagtgtagctggtgccaacaggagtttgcacgagaactgtggctgcgggagattttatggccattaggaattcctgcttcagagaagtgtccagactgtaggagtaaattgcagtttgttgatttgactagctgctgcaagacatgttgtaatgaaagccaaaattgtcgggattgtcgctattgggggcaacgttatccaaagtttcagctacagcatcgtgctctgatgacatacaatcaaggaatgcaggagtggctccatcaatacaaattaatgggcgattttcgtctgcgagctacctttctcccagagatcaagcaagctttcaaaggattgctctatgatctggtcatcccgatccccctttctcatgaacgctatcagcagcgtggctttaatcaagtgacagcagtattacaagctgccgggattgattaccgatccttactaaagaaaaagatccatttacctcctcaagcagcaatgactagaaacgaacgattagcagctccgcaaccatttattatcgaaaagggtcaagaaatcaaagacaaacgtgtgttgctggtggatgatgtgtatacgactggacaaacaatttatcatgctgcagaagtacttttgacttgccagccgaaaacgatcacgtccttttcttttgccagataaggaattgtaaacgcttaaaaaaatcttagcgattcgctttccaaatgcaagatacttcgatataatagagttaagaagaagaagagagtggtccttttccttcttagtgtggtagacgaaaggggtaatttttatgtttagatataatgtacgtggcgaaaatatcgaggtaactgaagcgatccgcgattacgttgagaaaaaagtaggtaaactagagcgttattttaatgatgtgcctgaagcaacagcgcatgttaatttgaaagtatataccgaaaaaacagcaaaagttgaagtaaccattccgttaccattcctagtcttgcgtgcggaagaaacttctcctgatctatatgcaagtattgatttggttgttgataaattagaacgccaaatccgtaaattcaaaacgaaaatcaaccgtaaatctcgggaaacagctttagtggctccagacaatggcgacttattcacaacggatacaaacgaagaagaaaccaatggagcagaactagacattgtacgtacaaaacgtctttctctaaaaccgatggatagtgaagaagccgttttgcaaatgaatatgctaggacataacttcttcatttttgaagatgccgaaacaaacggcacaagcattgtttatcgccgtaaagacggcaagtatggattgatcgaaaccgattgatcaaagaatgacttgtcggaaatccccaaaaaagtcttttttgacagagcagagtgatctgctctgtttttttgaataaaaaagctgtgataaaaggggcagttaaacaaaatgattcgctgagtgaaataaaattgccctatcaatcctgcaggtgtaaatccgatctgcgggatcataggggcaatttcatggcctttcggctgctgtgtttgctaaagtctttttgacatagttctttgctgagaaatcaataaatcgttggtactaaaccaccgtcgagtctcaaggcggctccagagaaagaggatgcgtaaggactagcaacgaaagctacaaagcgtccaatctcttctggacgaatgagccgttgaatttgagacagtgggcgatgctttttcatgaaatcttcttcccacatggactccggcaaatcactttcttgatacatcgttttcagcatcgtttctacgccttcggtcagtgttgaaccaggcatgatcgtatttacagtgacctgtgtcccagcggtgagttttgacaaacttttagccaaagagaggttcatcgtttttgtcatgctgtactgcggcatttctccagaaggcataacggcttcctcgctggcaataaaaatcacacggccgaagttttgttggagcatatgaggcaaataaaattttgctaaagcatttcccgacaaaacattcacatggaaaaaatgttcccaaacttcatcggtaatttccatgtaatccattggttcgaagatccccatattattgacaagaatatctactttagggaagtggtcaaaaagctgttggcgagctgctgcatcggctagatcatatggagccacttgaggattcgtcttaggaaatttttcttttaattcagcaacgaaagctctgacactgtccttttgccgtccattgacgatgacatccgcgccttcttttgccagctcgaaagcaattgcttttccaatacctttcgtagagccagtgaccagtgctgttttctttgttaatcctaattccatttccttcactccatttccttagttaaagttaaattgatccggatcgggacctacccggtgatcttcattcaaacgattaagttcacgcatatcttcttccgacaaagaaaaatcaaagagttgctgattttgttccattctgtcgggattaactgtcttaactaccagtaaaatatcttgctggatatgccagcgtaaggcgatttgtgcaggggatacgtgatggcgttgggccatctttacgaggattggatgttggagaatctgaccttgcatcaatggagaccaagcttggatcttgattccttgttgctgacaataatcacgcagttctttttgagctaattttggatgtagttccacttgatttaacacaggtttgacttttgctgtagcgagcaatttcttcaaatgatggctctgaaaattgctgacgccgatggctttgatctttccagcttgatggaggtcttcaagtgcccgccaagattcttgatacgcatttttgccaggccagtggagcaaataaaggtctaaataatccaattgcaaaagcgcgagggacttttcaaaagccacgatcgtttcatcgtaggtcaaataattgttccaaactttagaagtgacaaagagttcttctcgtgtaagtcccgttgctgctagtccttctttgatcccttggcctgttccgctttcattatcatatatttgcgcggcatcaatcaaacgataaccttttaaaatgccgttttttacaacagtagctacttcttcatcaggaatttgaaagacgcccaaaccaaagccaggaatgctgacttgttcgttcaatgtaattgtgtcggttaatgaatgaatcatataaatttcctccttgatttttggtaaatataccttatactaaaaaaagttcagatgaatagtacctacttttttgtgctatagtgtcaaaaaagtaacttttttgaatttaaaggaagtgtttaaagtatgactccaaaaaaatacaacattggtgtggaagctactatggatgtgatcggtggaaaatggaaaccgattattctgtgtaatctgcgagatggcgccttgcgtccgagtgatttgaagcgacggatacctgatatcagtcaaaaaatgctgacgcagcaactaagagagctggagacagacggcatcgttttgcgaacctcttatcaccaagttccaccaaaggttgtctattctctcagcgactatggtctgacattaagcagcgtattggatgctctctgtcattggggagaaatgcatgtttcaacattgaaagaacaaggcgttgaagtagcgttagctagtcaagaggcgtagggaagatcaaaaacaaaaactagcaatcgtcgagtcgagagtcactcagcgattgctagttttgcttaaaaaaagtgaggtaggaagagggttatttcactgaaccggaagtaattccttgtacataatatttttgcatatagataaagagtagagtgattggaatagcgatcagcacacagccagctgtaaaggacataaacaacgaattggctgttgtttttgtcatcatagaataaagtccgatcgcaacggtatagtttttgacgtcatcacccatgatgattcgagcaaagatgaaatccatccaaggacccatgaaggccatcaaagaggtatagacgataattggttttgataacggcaatgtgatcttggtaaaaatatgccatttattggcaccatcgatcatggcagactcatctagcgccattggaatcgtatcaaagaaccctttggcaacgtagaatcccagtgccgctccagccgaataaaccaagatcagcgctaataagctttgtgttaggttgagggcttttagaatataataaatggcgatcatgctcataaagcctgggaacatattcaataccaaggcaactttcaagaaaggtttacgaagtctaaagcgcaaccgagagagagagtaggccattgcgattgtaataaatgtggacaaaagacagctgcagacagcaacaaacaatgtattcaagaaccagcggacaaaagggtagctgccgctatcattggctaatagttgtcggtaattttcaaaagtgaattctttgggaatgatataaggaacgaaggccccaccttctcctctaaaacttgtcaaaatgatccaaacgatcgggaataaccaaagaacagaaagaatgatcaaaatcgtataaatcagaaaacgggtttttgactgcccttgttggtagccggatttctttttctttacagacattgttacccctccttataagaatttgttcgcgtgtacgcaaacaggctaaagacagcagataagataaagatcaagataccgattacggaagctaaattgtaatccatcgtgttgactgtcaagttgtacagccacgttactaacagatcggtcgagccagcaccatagaaattagagttagatgggccgccgccagtcaataagaaaataacattaaagttgttgatgttgccgataaactgttgaatcaatgcgggcatcattacaaacaatatctgaggaaatgtgatggagcggaaaatttggaatttattggcgccatcgatttcggctgcttctagttgttcctgatcaagattttgtaagattcctgttgttacaagcatggttgctggaatcccgatccacatgttcacaaagataatgctgactttcgcaaagaaaggatcggtcagaaacgggatcgaagaagagatccatccccaattcagtaagagtgagttaatcggaccagaaccgtttagtaagttacgcatgatcaaaagtgacacgaattgaggaactgccatcgtcaaaacaaaaatggtgcgccacaattttttgtaacggatccctttcgcgttgatcaataaggctaagatcacgccgaagaagaaacaagtgatcgttgcgagtacagcccatgtcaatgtccaagctagtactgggaaaaaggtggacgccatatcaccagtgatgacattagagaaattcttcaatcctacccaagtaaacagattttttgggggtaaatttttgtgatcataattggtgaaggcaatcgaaatcatatataagagcggtaagatagtaaaaaataagacaccaatcaatgggattgtcatcaatgttgcatgaaagcgttcgttcaccagactatgtaaatcgtcgcgtgtcgtagggattttaagtccttgttgttttaattcgtacaaatgacgggcgcttttcaaattaatgatatagagaataatcaagagtgcacaaacgagcagggaagcaataccgaaaagcaataagagcattgaattgtcacctttttgcaagatttcaataccaagtgcttcgttatagaccaacccttgtttttgtgttcctaatgtttgcagcatcagaagagcgtggaaaccatttcttatgaaccaagcgataaaaccaacttgtgatacgatgaaaataattcctttcagccattgtttattggcgaaattagcgcttcccatcaaaataaaagatagttttgtcgctagatcgccttttttgaataattctctaaaagtgatatgcgacgcatgttttttcctgaacatatcctctcaccttgctttcgtaattaactagaaaagggaaagcaggctttccctttgtcatgtatagtgatgtgttgttgattattcggttacttttgaaatatcggaaacaaacttatcgagtttatcttggaactgatctggtttgatttgacctttataggtatcgttgattaacgcatccattggtggccagaaagaaaccatctcaggcaatttaggcatcacgacagagtgttctgcatcagacatttccatcacagcttttgctactgcatcagcttttactgcatcagattcttgtgcatctttatttgaagggacaacgccgttttcagtaaattcgatttcttgtgtttcttggttgcttaaatattctgctaaagccatagctgctaatggcgcttcggtttgttggttgacagcataaagttttacacctaagaaagctttcatttgtttcgcaccactgccgaagtcgatcgttggataggcggcaacacccatgttgtctccaagcgctttttctacgtcattttttgaccaaggacctgaaaggaaggcatctgatttaccagattgcaaatcagacaacgcggattcactggcttgaaggacaccgctattatttttttgatcggcgatccattgtaagacttcaacaccagcttcgttgttgaaattggttccattaatatcttcaccgtcttctccataaagaacatttccgttgctcataaatagagggccaaaaatgtagtttgcaccgtcttctgcaaagttggtaccgatttttccagcggaagtcaatccttcccaagtttttacatcatctgctgtcaatgtagaagtattgtaataaagcacttgagattcaacaccgtaaggatagccgtaaattttgtctttccaagtcacggcatcaactgctgcttccacgttcgtatctttgattgttgctgcttgcttatcaccgattggataaatcagaccagcttcagccatttgtcctacttggtcatgaggcatcatgaatacatcggctgcttgttcagggtcctttgagacgtctgctttggcatcggcagaagagccaactgcaactgttacttttacatcaggatactctttttcaaatttgtcgacttgcccttgtaaggcatcaatatgttcggtatctacccataatttaatatcaccttcgacttttgcactagactccgctgcactgccattgcttgaagcagcatcgtcgttgctgttgccacaagcgcctagtacgattgcagacaagcttaaaatacttcccccaataagtaatcgttttacatctaccttcattcttgttcctcctaaaaattaattgtttgcgtttacagacctaattatgcaatcgattgcaataatagtcaagcagaaaatgaacaacttttttggttttctattgcttataagaaaaattaagaatcagtccaacacaaaacctttctacaattggaatgataaagtcgaaattttcaggaaataacttagttattctattcacatttgaaaagcgaatgaaaatgtggcagatcatttttccgtccgttgtaaagcaaacgattgctttctgtttcagagattgttttaaggagcaagagaagtagagtttcttttggacacaagaagcaatgggcgtaaaagaaatctatttaaaacaattgaaaaaagaaaaaaagagttaaaaaaatcatggagaaacatgaactgcgccgaaaaatatttcctttatgatgaactagtgataaaatagttaggagagtttccagttaggaaaagtagaaataaaaggagaattatataggcatggccaatttttttagaaaattaatcgagaatgataaaaaagaattaaaacgtcttgaccatattgcttcacaagttgaatctcatgcggacgaaatggccgctttatctgacgaacaattgcgcgaaaaaacagatgaatttcgcggtcgttttcaacaaggtgaaacgttagaccaattattgccagaagcctttgctgtggttcgcgaagcggcaaaacgcgtcttagggctgtatccttaccatgtccaattaatgggggggatcgtgcttcatgacggaaatatccctgaaatgcgtaccggtgaaggaaaaaccttgactgcgacattgccggtttatttgaatgcgttaagtggtgccggtgtacacgttgtaacggtcaatgaatacttggcaactcgtgactctacagaaatgggtgagttatataatttcttaggattgactgttgggctaaacatcaattcgaagacagcagaagaaaaacgggctgcatatgcctgtgatatcacctacagtacgaataatgaactaggctttgactatttacgtgacaatatggtggtttaccgccatcaaatggttcaacggccattgaattatgccatcgtcgatgaagtcgactcaatcttgatcgatgaagccagaacaccattgattatttctggacaagcagaaaaatcgactgcactatacaatcgggtcgataattttgtgaaacgattaaaagaagaagaagattacaaaatcgacatccaatcaaaaacaattggattgactgaaaaagggatcgagaaagccgaagaaacatttggcttggaaaacttgtatgatatcgaaaatacagcgttgacccatcatatggaccaagcgttgcgggcgaattatatcatgatccgcgatatcgactatgtcgtacaagaaggtaaagtcttgatcgtcgaccagtttactggacggatcatggatggacgtcgttattctgacggattgcaccaagcgatcgaagcaaaagaaaatgttgagatcgaagatgaaaccaaaacgatggctacaatcactttccagaactatttccggatgtacaaaaaactttctggtatgactggtaccgcaaaaacagaagaagaagagtttcgtgaaatctacaatatgcaagtcattcagattccgaccaatcgaccaatcgttcgtgatgaccgtgcagatttactttatccaacgctggaaagcaagttccacgcagtggtgcaagatatcaaagaacggcatcgtaaagggcaaccagttcttgttggtacagtagctgtagaaacttccgagctgctttcaagcatgttggatagagagaaagtccctcatgaagtactgaatgccaaaaatcactttaaagaagctgaaatcattctgaacgcaggacaaaaaggtgctgtaacgatcgcaacgaacatggctggtcggggaacagatatcaaattaggcttaggtgttgctgaattaggtggattagcggtcatcggtacggaacgtcatgaatctcgccggattgataaccaattacgaggacgttctgggcgtcaaggagacccaggggtttctcaattctatctttcgttggaagatgatttgatgaaacggtttggttctgagcggatcaaagtgttcttggatcggatgaagattgatgaagaagatgccgtgattcaaagtaagatgttgtctaaacaagtagaatctgcgcaaaaacgagtagaaggtaacaactacgatacccggaaaaacgttttgcaatacgatgatgttatgcgtgagcaacgggaagtcatctatggtcaacgtcaagaagtcatcatggaagagcaggatctttcacaaacattgatgaatatggtcaaacgatcgattgaacgagttgtcgatagccatacccaattagaagaaagcaattggaattatgaagggatcgtcgactttgccggaaatgctttagtgcatgaagattccatctctgttgatgatatcaaaggcaaaaaaccacaagaaatcaaagactatctctatcaacgggcagaagaagttttcgagcagaaaaaagcccaattaaacagtcaagaacaattgttagaatttgaaaaagtagttattctgcgagtggtggatacgaaatggacggaccatatcgatgcgatggaccaattaagacagtcagtcggtctgcgggcatatgggcagaacaatccattggttgaataccaaactgaaggatacaacatgtttgaagatatggtgggagcgatcgaatatgaagtgacacgcttgtttatgaaagccgagattcgccaaaatgtacaacgagaacaagtcgctcaaggagaagctcaagaaactgaaacagtcccagaagaagatcctagtttcaaaaatgttggccgtaatgatccgtgtccttgcggcagtggcaaaaaattcaaaaactgtcacggcaaaaactagaagaattgatacgttaggaaaaaggctggcagcttttcttgtccagccttttccgttcatttacaatatgcgtgaagaaagaaggaattcaaatggaaatcgcagatatccggaatcaattgaatcaaatgaatgaaaaaataaatagttttagggggtctctttgacttagatcagttagaagaggcaatcgctgaagcagaacaccagatggcggaccctacgttttgggatgattctgagcaagcacagaaggtgatcaacgagaacaatgccaataaagaaacctatgatcagttcaatcaattggcagaagaatttgaagagttggaagttcttttggaaatgatccaagaagaaccagatgcagaaatggaagcagaactagcagaacgtatccaagctttgaatgaaaaaatgggaacttatgaactgtctatgctgttagatgaaccatatgatcgaaacaatgcaatcatcgaactgcatccaggtgctggcggcaccgagtcccaagattggggcagtatgttgttgcggatgtatactcgtttttgcgagcaacatggatatcaagtcgaaacattggactatcaggcaggagacgaagccggaattaagagtgtcactttgttgatcaaaggccataatgcttatgggtatttgaaatcagaaaaaggcgtccatcgcttagttcggatttcaccatttgattcagccaaaagacggcatacctctttttgttcggtagatgtcatgccagagctagatggtgcgattgatatcgaaattaatagtgatgacttgaaaatcgatacttatcgagcgagcggtgcgggcggtcagcacatcaataagacggagtctgctgtacgaatcacgcacattccaactggtaccgtagtggctagtcaagcacaacgttcgcagttgaaaaaccgggaacaagcaatgggaatgttgaaagcaaaactttatcaactagaagtagaaaagaaagaacaggaagctgcagcgcttcgcggagaacagatggagatcggttggggttcacaaattcgttcctatgtctttcatccgtattccatggtcaaagatcaccggactaactttgaaacaggaaatgtacaagcagtaatggatggtgatttagacggctttatcgatgcctacctcaagttgaaattaaatcaaaaataactatactgggctattaaacagattgaaatataattgtaatctgttgaaagcattgtgaaatatattcatgctataataagccagtatgaaaaaaagtgagatggagagatagctgcatgattgaaatgaaagaagtaatgaaaaagtactctaatggtacgactgctatccgtaatctttcgatttcaattgatcaaggtgagtttgtttatgtcgtcggaccttccggtgcagggaaatcgacctttatcaaattgatgtatcgtgaagaaaaagcaacgaagggtgttcttaatgtagcagggtatgacctgttgacgatcaagaatcgcgaagtgccattgatgcgccgcgaaatcggtgttgttttccaagattataaattgcttccgcgaaaaacggtttatgagaatgtcgcttatgcgatgcaagttattggccgcaagcctcgggaggtcaaaaaacgggtaatggaagtattggaccttgtaggattgaaacacaaagtacgagtcttcccaagtgagctttcaggcggagaacaacaacgggtttctattgcacgagcaatcgtgaataccccgaaagtattgattgcagatgaaccaacaggaaatttagatcctgagaattcttgggagatcatgaagttgttggatcggatcaatgcacaaggaacaacagtagtgatggcgacacacaatagcacgatcgtcaatacgattcgtcaccgtgtaatcgcaattgaaaatggtcggatcattcgcgaccaagcggaaggagaatatggttacgatgattagaacgtttttccgtcatctccttgagagtattaaaagtttaaaacgaaacggctggatgacgatcgcgtcactcagtgcagtcacgatcacgttgacgttagtcggtatctttttgggtgttattttaaatgcaacgaagttagccgaagacatccgtaagaatgtggatgtttctgtctttgtggatatcggaacagaacaaaaagacatggatactttggaacaatcgcttaaagaattaccgaatgtttcagacgttcgtttttcgagtcgtgatgatgaattgaaaaaaattcaggatgcgatgggggattcttggaacttattcgaaggggacagcaatccgctttataacgtatacgttgttagtgccacagatcctgaatacacgaaaaaaattgcaaaacaagctggagaattgccaaatgttttcaaagcagactatggtggcgattcttctgacaagatctttgctctatcagctgcggttcgtacttggggacttggggctgctatcctattgatctttgtggcaatgttcttgatttcaaatacgattcggatcacgatcttgtctcgtcaaagagagattcaaattatgcgtctggtaggtgctaaaaatggttacattcgctggcctttcttcttagaaggcggctggatcggattgctgggatcaattgtccctatcgctattatgtattttggttatcaccaagtttacttgttagtcaatccagcactgctacgttccaattatagtttgattgcaccaaatcagtttctactgcaagtttgtggtgtcatggctctgatcggaatcgtgattggttcattaggatcgatcatctcaatgcgccgtttcttaaaagcgtagaacgtgttattgaaacagatctgctgactagcaggtctgtttttcatttgccgacacctttactttagactgcaagttcgctattcttttaggagaggtgagggttggtatgttagttatggataacctgttcacgatcattttcttcgtgaacattttgttgtcgattgtgattatttttagagaaagacggcaaacggctcagacatgggcgtggttgcttgttttattgtttataccagtcgtgggatttgtactctattttttctttggtcgcggaatctccaaagaaaaaattttcgatttgaggacacaagccaaaattggtttgaacgtggagctggaagagcaaaagcaagcgctgcagcggaatctttatccccatccgcccactgcgcaagtagaagtcaaacagctcgtttatttattgacgatctatggtcagtcgttatataccactacaaatgaaatgactctttataaagatggtcgaaaaaaatttgatgcattactcaaagatattgaaggcgccacagatcatatccatatgcaatattatatttatcgcagtgatacattggggggagaagtacgagatgctttgatccgtgcagccaaacgaggagtgaaagtccgtgtgcttttggatgcttggggcagcacccaggtttcactgaaattcttcgatgaattacgggttcatggcggtcaagttgcgttctttttcccgttgttcgttccttatctcaatcctcggatcaattatcgcaatcatcggaaaattgtcgtgatcgacggcaagattggttataccggtggtttcaatgttggaaatgaatatttaggtgaggtggaaaaatttggttattggcgggataatcatctgcgaattttaggaccagctgtttactcactacaaaaccggtttttgatggactggaattcacaacatgctatcgaaatcaaatatgaagcagcgttgtttccaatgatcgaaacaaacggaacgattgctgcacaggtagtgactagcggtcctgattcagaacacgaagagataaagataacttatttgaagatgattaatttagccaaaaaagaaattttgattcaaactccctattatattcctgatgaatcgatccacaatgccttgaaactggcacttttgtccggtgtttctgttcatttgcagatccctaataaaccagatcatccacttgtctattgggcaacttactcttttgctgctgagttattagcctatggtgcagtggtagagacttatgagaaaggttttatgcacgccaaaacgatgattgttgacagtggggtcgtttcgattggttctgcgaatattgatgttcgttcgtttcgacttgactttgaggtcaatacagttgtctatgatgcaaaagttgctgaggaagcgcgccaagcattttttgctgactccaaggattcagaggaattgactttggaaaaataccggaatcgccgattgttgatcaaggtcaaagagggattagcacgacttgtttcgccgcttctatagaaactatttagtaaacgtaggtgaaagttgggtaacaaaaaaacagcagtaatgctgaagcacctcttctaacgtttgttttttggatcaacgttagaaggtgattcatgcaactgctgttttttattatttcatgatacttgtgtaggctgccagaaaaactgacccgactgtcaaaataagcattgtccaaataactacttgagtgattttggcgaaggtgctttttggttttttttcgttcatcgtgatccaccttttagattgatttctagtcacagtttacctccaattaccaaagaactcaagctgctattcttataaattaagaaatcttgaatattttgcaagagcacaaaaagttttttcaaagattctcttgttgaagggtggttgttctgttttaattagtaaagatatagagaaaaaataagtagaaaataagcaggatgcttgagtaaggaaagtaaaagattgcagactgtcttattggaccgcggatttttaaacgaactgaaacatagatgtaaagaaaataaagtatagttacactagctgttagaaaggatttgtttgtatgtctggatttgggcctgctgttttattttggtatatctttccattagtcgttttttttgcttgcagatttttagtttctgcgttgtctttgaaagaacggtttggactgaaggcacccgacttagctgtgccttttttggtgattgggattcatcagttatcaaagaatacttttgagcaatcgatcactccctattatttgatctctatcttattactggggattctcttagctgtctttcaagcgtattattacgaagaaatccagtatggcagatacatcaaaatgtactggcggagtatctttttgtttacattgattttccatgttgttttgatcattttaaatatcgtcacgtatttgtaatttgtgacagggagaacccttatcccatcgagatttttctgcttaaagtttttttaaaaactttttaagagaaagaaactcctgttttttcgtttggtaaaaattagtcaaagaacttcacttttaaatttcacgttaaatgtggtagaaagtgggggattgtggtagactgtgattatcaggtggagatcgggggttatttatcgatgtttatgggtgaatttcaacattcgatagatgcaaaaggccgactaatcgttccttcaaaactgcgagaaaaactcggagaaaaatttgttgtgacacgtggattagatggctgtttatttggctaccccttatctgaatgggaaaaactagaagaaaaactgaacgaaatgcccttggcgaagaaagatgctcggacattcgtacgtttcttttattccgctgccacggagtgcgagatcgacaaacaaggtcgtatcaatattccggcaaccttgcgtgaacacgcgtcacttatgaaaagctgcgtgatcatcggcgtttccaaccggattgagatctgggatgaagcgcgttggcaagcatttaccactgaagcagaagaaaattttgatgaaattgctgaaacaatgattgattttggcttataggaagaggaaagcgcatggcagaatttcaacactacaccgtaatgttgaaggagacagtggacggtttagctattcgtccggatggaatctatgtcgattgtacattaggtggagcgggtcatagtgaatatttattgtcccaattatcagaagagggacacctctacgcatttgaccaagatcaaaaagcgatcgatcatgccaaagaacgcttagcgtcttatgtggctaaaggaatggtcacgtttataaaaagcaatttccgctatttaaaggaagctttgcagcaacagggtgtcgatcaagtaagtggtgtgttgtatgatttaggcgtttcttcgccgcaattagatgaagcagaacgtgggttcagttatcatcaggatgcaccattagatatgcggatggatcagtcggctgctttgactgcttatgaggtagtgaatcaatttgattatcaccaacttgtaaaaatctttttccgttatggagaagaaaaattttcaaaacaaattgctcgtgaaattgaacggacacgagcaaataaaccaatcgaaacgactggagaattagtcgagattatcaaaacagcgattcccgctccggcgcggcgcaaaggcggacacccggccaaacggatcttccaagccattcggattgctgtgaatgatgaattaggtgtcattgaagaatctttggaacaggccatcgatttattggaaaaaaatggacgaatcagtgttatcactttccattctttagaagatcgaatcgtcaagtctacgttcaaagcttacagcaccccaaaagatgtgccaccagggttgccgatcatccccgaagaatttcaaccagtactaaaattaattactcgaaaaccacttcttccctctgaagaagaagtatctgaaaacaatcgttcccgtagtgctaaactgcggatcgcggaaaaaatgaaggaaagcgaaggttagcaattatggcagaactaaaagttcatgattatgaatttgaagaaacgtctgaacaagagttttatgctcactctgaaccgacaattgaacagctgccaagcgaacctgagcgtcctgaggttatccgtgtaccagcatctcctgctcgccggttaaaaagtatctctaatttagaaaaactgattgcagcatttgtgatcattgccgttttgacattagcgatcctgacgatcaatattcggactacgatcagtcaagtcgaacatgatatttcactgatccaatcagacatcaatgaaaaaaatagtcaagcagaacaattagagcaagaaagaaacgaactttctaaaactgagcgtatcaaaaaggttgctgaggataatggattgtcgatcgatgatgacaatttaaggaaagtggattaaatgaagctaacagataaattcaagcaatacttgaaaaagaaaaaccaaactacaacgaacaatcgcaaaaaagtaggtattattctctttgctacgagtattggattgttctttttgtttgtcacgcgtttgagctacattgttatcgtaggtaatgtggcaggtacttcattggctgagaaaaccaagagcctttatcaaggaagcgaagttgtcaaagcaaaacgcgggacaatctatgatcgcaacgggatcgcaatcgcagaagatgcaacttcttattctgtttatgctattttgtcaaaatcctacgttagtgggaaaaagaatttatatgctgaagagaagaactttgataaattagccaaaattctgaatgagcaactaggtattgatcagaatgaggctgtgcaaactttggaaaaaggtctaaaagaagaacgttggcaagtggaattcggtagccaaggaagtaaaatgacgctggagaaaaagacagcgatcgaagaagcaatgaaaaaagaaggaatcgctggcctttattttacagatcatccttctagaatgtatcctaatggaattttctcttctcactttatcggctatgctctagcagaaaatgaggagaacgactcttctggcttagtaggaaaaactggtttagaagctgcttatgatgatgtattatccggaacagacgggaaaatcgtctatcaaaaggataacaatcaaaacccgctaccgggaacggtggcagaatcagtggcagcggtagatggcaaagatatctatacaacgattgatagccggattcaaagctatttagaaacgctcatggataaagtgttcaaagaatacaagccagaagatctgactgccacattaatgaatgcaaaaacaggagaaatcgaggcgatggcacaaaggccaacctatgatcctgatgatttaagtaccatcaaaacctggcagaatttattggtcgaagacaactatgaaccaggatcgaccatgaaagtcttaaccacagctgctgctatcgatcaagggatattcgatgaaaatgaaacttttacaccaagtccggacggattgaaactgtatgatgcgacaatcaatgactgggactttggtcaaaaaggaacattgacgatgcgtcaagctctttcttggtcaagtaatattgggatggttactttggaacaacgaatgacagaccgttggcaacaatacttgcaacagtttggatttggtcgcagtacgtactcgggtctgccaaatgagaatactgggatcatgccggaaaataatccggtcagtcaagcaatgacttcatttggtcaagcaatcggtgtgacgaattttcaaatgatgcaggcttttaccgcagtcgcaaataacggcacgatggtcaagccgcaatacatcagcaaaatcgtggacaatgaaacaggtgaagagactgtaacacagccagaagttgttggacaccctatcacggaacaagcagcgacgaaagttcgagaatatatgcgtgatgtggtagaaagtgaaaactacggaagtgcgtatggtgtctatagtgtacctggttacaatatttcagcaaaaactgggactgcccaagtagctgatccaaaaactgggaaatacttatctggggattccaattacttgtactcaatcgtagaaatggttccttcagaagaccctgaatacattctttatctaacaattaaattaccagaacaccacgacagcgaagcattggcaaaaatcgccaatccgttgatgaaacgcgtgatggatttaaagaaagcaacattagaagaaacagcaacagaaaatagtcagaaagtaaccgtcaatgattatcgtaaattagatacaactaccgcggcaactgatgtacaaaaaattggtctagcacctgtagtattaggggatggaaaaacagttatcgatcagtctgtggacagtggatcgaaagtactgccaggagaaagacttcttttgctaacggatagtgacaaaatttatatgcctgacaccaccacatggtcaaaagctgatttagtcaaattgggcaacatgttggatgttgatgtcaaatttgagggcgacgggtattgtgtttcccaaagtcttgcatcttatgaggaaatcacggatcaaacaattaccttcaaattgagcgaaaaagaatagggagagaacactatggaatggacagagatgatattgccacttgccagtagttttgcaatcgttactgctgcaatgccgctgtttatcggctattttcaaatgaaaaaatacggacaagagattcgaggagaagggccaaaatggcacaatgtcaaagctggcactcctacaatgggcggcttcgtatttttgattgcggcattgatcacagcagtttgggttggcgcatggcaaaagcagttgaccgcatcgctgttcattttgttatttattatcttggtttatggtgcgcttggattcttggacgatttcatcaaaattttcaagaaacgcaacatgggtttaaactctttacaaaaattgatcggacaaatcatcggtgggattgtcttttatctggtctttttatcagaaggcaatgcgaatgttttgaatctctttggatttgagctgccgctatcgatcttttacggcgcatttgtgattttttggttagttggcttttcaaacgccgtcaacttaacagatgggattgacggcttggttgctggactcggtacgatctcatttgcaacttatggcctcattgcttggcgtcaagatcaaatcgatatcctgatcgtctgcttagcggtcattggaggattgatcggcttcttcccttacaatcgtaaaccagctaaaattttcatgggtgatgtgggctcccttgcattgggcggtcttttagcagcagtttcaatactgcttcaccaagaatggacattattacttgtcggacttgtctatgtgattgagacagcaagtgtcatgctgcaagtcgcttctttcaaattgactggtaaacgaatttttaaaatgtcgcctattcatcaccattttgaaatgagtggctggtcggaatggaagatcgatacaattttttggctgattgctttaggatgttcgatcatcacattagtgattgtatggtaggagagaggaatcatatgaaaaatataaatgaatatcaaaataaaaaagttcttgtgctaggattagcaaaaagtgggttcagtgcggctaaattgttacatgatttgggcgcgcttgttactgttaatgacggaaaaccctttgccgaaaatccagaagcacaggatcttttggcgttaggcgttaaagtaatcaccggcagtcacccaattgaactactggatgagggtttttcacttgtggtcaaaaatcctgggattccttatgatcagcctattgtccaaaaagcgatcgagaaaaatatcccaatcattacggaagtagagttagcttacaaaatttcggaagcaccgatcattgggatcactggaacgaatggaaagaccacgaccactacgatgatcgctaatgttttaaatacgggatttagtgaaggccgggcattgttgtctggaaatattggctttccagcaagtaacgtcgcccaaaccgctagcgctaaagatcgcttgatcatggaactttccagcttccaattgatggggatcgaaacattacatcccaagattgcagtcatcacgaatatttatgaagctcatctagattatcatggcaatcgatccgaatacgtgcgggctaaatggcggctgcagcaaaatatgacagcagaagattttctagtcatcaattggaaccagccagaattagtcgaactttctcaacaaacaaaagcaaaagtgattccattctcgacacaacaaaaagtggccggtgcgtatctttttgaagagcagttatatttcaaagatgaggcaatcatgcctgtttctgaactgggcgttcccggcagtcacaatgttgaaaatgcattagctgcaatcgcagtggcaaaattagaagggatagcaaatgaggctatcgttcaagcattgcatacatttagcggtgtacctcaccgtactcagtatgttgatacgattgaaggggttcgctttttcaatgattcgaaagccacaaatagcttggcgacagagatggctttaggtggtttccaaaaggatcagttgattttgttggctggaggattggatcgcggcaactcctttgatgagctgattccatcactgcaagatctcaaagcgattgttttgttcggacaaacaaaagagaaacttgctgaagccgcacgtaaagcaggaatcaaaacgattaaattgacagaagatgtaactacagctgttcctttggcttatcaattaagccaaccgggagataccgttttattatcaccggccaatgcaagctgggaccaatacccgaactttgaagtacggggggataaatttatggcggcagtagcagaacttaacagaaatgagcgaagtgaatgaaaatactagtaactggcggtggaaccggcgggcatatttatccggcattgtcttttgtcgattatgttcgttccattgatccaacagctgaatttttatatattggggctacccgtggattagagaacaaaatcgttccaccaaccgggattccttttaagacgttagaaatacaaggctttaaacgaaaactttcattggacaatgtcaaaacagtccaacttttcctgaaaagttatcgtgaagcaaagaaaatactcagagaatttcaaccggatgtagtgatcgggacagggggctatgtctctggtgctgtggtctacgcggcatcagtacttaagatcccaacgatcatccatgaacaaaatagtgttcctggaatcactaataaatttttgaccagatatgtggacaagattgctattgcttttcaggatgcagcgcactattttccggataagaagacggtcttggtggggaatccccgcgggcaagaagtaaaaaacagtcagaagtctgcgatccttgcttcctatgaccttgaccctaagaaaaaaactgttttagtctttggcggcagtcaaggagcactgaaaatcaatcaagcgattatcgaagcaattccgatttttgcaaagaaagattatcaactgttatatgcttctggtgaccgttattaccaagaaatcgaagagaagatcggtatgtcgaaagatgcctttccaaatatcagcattcgcccctacatcgatcaaatggcagaagtcatggcgaatagtgacttgttgatcggacgagctggcgctacatcgatcgctgaatttactgcattgggattaccagcgattttgattcctagtccttatgtgacgaatgatcatcaaacaaaaaatgcgcaaagcttagtcaatgctggggcagtcaagatgattgcggacaatgagttgaacagtcaaaatctaattgagtgtgtcgatgcgatcatgagtgatgaaaacgtacggatggaaatggcaaaggcgtcgaaagagcaaggaatcggtgatgcatctgagcgactatttcgacttgtgcaagaggtaatcaaatagtacaatgtgttggatagaaaggagagattgtcatcagtaaagataagaaatctcatgataatcaaaccacccccacgacagaagaattgaccccttggcagaaagaaaatctgcgttatcaaaaagaaaaaggcgatcaacctgtatggtcaccctctgtcatttccgggattcactcagatgaagaacaatcagaagaccaaacagaagaaaagcacgaagaaggcgcagagactgaagattcagaacaagctccccgctcttttgctgatcgattgcccaatttaaaaaaataccgtaatcgagtattgttgcgccgattgctgttgattattggtgttttgctgatcccgttgttatttattctgtattacgtctccccgttgagtaagttagcggatgttaaagtcgtgggcaatgatcaagtgtccgcccaatcaattattgaacattcggaattaacgactggagaagaaatatggccgcagtattttgacagcgaacaaacggaacaagccatcaaaaaagcgttgcctcgtgtcaaaaatgttcaagtgacaatcacttctttaaaccagttcaagattcgggtatcggagtaccaagaggtggcattgctagcaagcgataatcattattcacctattcttgaaagtggtgtcgtggtcaatgaaccgagtgaccagcctctggaaggactacctattttagagagcttttcagatcagtcaaaaatcaaagaagtactgactgcttatcagaagctcagtcaagagattcgtgaaggaatttctcaaatcaagtacacgcctcgggacagtaatgacgagttgttaacgatctatatgaatgatggtaaccaagtgattgtgaacatttcaaatatggctagtcaaatgcagtattatccgcaaatcgcaaaagatttgaaagaagacagtatcatcgatatggaagtgggcatctttacctatccgatttccaatacaaaagacagtgactcggcaacagaacaatcgaccgaaggggattcttaggaaaaattcaagagtttttttcattaacttgtttctaaaaatcgctattatatggtagaattggtaacagtgaacaaattattctaattagatataaatacgaacttttcaaggttcgcgatatatgcaaattaagtaggagggaaccccatccatggcaaaaacgggaatgtatgttggcctcgatattggtacgacatctgtgaaagttgttgtagctgaatacgttgatagccaaatgaacattattggtgtaggaaatgcaaaatcagaaggaatcaaccgcggaatcattgtagacattgacaagacggttcaagccatccaaagagcagtaagacaagcagaagaaaaagcgggtatccaaattcgcagtgtgagcgtgggtgtgccagccaatctgttagaagttgaaaattgccaagggatgattgctgtcaacagcgaatcaaaagaaatcacagatgacgacgtgcgtaacgtagcatcagcagcgctcgttcgatctacacctcctgaaagacagatcattgccattttaccgcaagagtttactgtggatggctttgaagggatcaaagatcctcgcggaatgatcggtgtccgcttggagatgtttggggtagtttatacaggccctaaaacgattttgcacaatattcgcaaatgtgttgaaaagtccggcttgattgttaacgaacttgtaatcacaccactagctttgactgaatcgattttatcagatggcgaaaaagattttggtacgatcgtgattgatattggtggcggtcaaacaacaacttcggtaatgcatgacaaacagttgaaattcacccatgtcaatcaagaaggtggagaatttgtaacaaaagacatctctactgtgttgaatacttctttcaataatgcagaagcgctaaaaatcaattatggtgatgcttatcctgaacgtacatcggcaagcgaagaattcccagtggacgtcattggtaaatctgaacctgtcaaaatcgatgaacggtatcttgctgaaatcatcgaagcacggatggagcaaatctttaataaatcaaaagatgtcttgaatgaaatcgatgcgtttgaattaccaggcggaattattttgactggcggagctgctagcttacctggcgttgtcgatttagcacaggaagtcttcgaaacaaatgtgaaattatacgtgccaaaccatatgggattgagaaatccggttttcactaatgtgatcagtatcgttgattattctgctaatttaagtgaagtttatcagcttgctaaaagcgcgatcacgggtgaacgtacgacgcaacaacctgttgctgttcaacaagagatttcttatgagcagtatgaggctccagaagaaacttatgaagaaccagaagaagagaagaaaggcgaatcgatcacgaatcgtgtaaaagatttcttctcaaatatctttgaataatctaaaacgatactcaggaggaagataaactatggaattttcaattgataacaatatcaatgatggcgctgtaatcaaagttatcggtgtcggcggcggcggcggcaatgctgtcaaccgtatgatcgaagaaaacgttaaaggtgtcgaatttatcgctgccaatacagatgtgcaagcattgaaaaattcaaaagctgaaacagtgatccaattaggccctaaatatactcgcggtctaggtgctggctctcaacctgaagttggagaaaaagcagcagaagaaagtgaagacgcaattcgtgattccttgcaaggcgctgatatgatctttatcactgccggcatgggtggaggtaccggaactggggcagctccgatcgttgcaaaacttgccaaagaaatcggtgcattgacagtcggcgtagtaactcgtccattcacatttgaaggaccaaaacgcggccgtttcgcagctgaaggaattgcaaaactaaaagaaaacgtcgatacattattgatcatctccaacaaccgtttattggaagttgttgacaagaagacaccaatgctggaagcattccgtgaagcagacaatgtattgcgtcaaggggtacaaggaatctctgatctgattactgcaccaggctatgtcaacttggactttgctgacgtgaaaacagtaatggaaaatcaaggaacagcattgatgggtattggtgttgctagcggcgaagaacgtgtcatcgaagcaacgaaaaaggcgatttcttctccattgctagaaacatctatcgatggtgcagaacaagtcttactgaacatcactggcggattagacatgactttatttgaagcacaagatgcttctgatatcgtagcaagtgctgcaacaggcgacgtaaacattattctaggaacttcaatcaatgaagacttaggagatgaaatccgtgtgactgtgattgcaacaggtatcgatccttcaaaaaaggaacgctcttctcgtacaagcagacaaagtcaaatccattcaattccacaaaaaccaacgttagatatggatcaggcgaaaccttcacacgtagaagatgatcatggctttggtgattgggatattcgtaaagaacaaaacgttcgtcctaaagtagaagaaagccaatttgagaatgttgaaaaaaaagaatttgatacattcaatagagatgaagtaaaaacaaatgacgacgatgaattaagtacaccaccattcttccgtcgcaaacgctaggaggcagagcacatgatttctgagaacttgcacaagatccagcaagagatccaggattcttgtgctcttgtttctagaaaagcaagtgaggttcgtctggttgctgtgacaaaatctgtcgatagtgaaaaaacacggaagatcatcgaagccggtgtcactgactgtgcggaaaaccgagtagaaaaactcctggaaaaaaagcagcaactagcagactttccagaagtaaactggcattttattggtaatttgcaacgcagaaaggtaaaatcaattataaatgaagttgattatttccatgcgttagaatcgctgaaattggcgcaagaaattcaaaaacgagcagcaaaaacgattgcttgttttgtagaagtcaatatttcaggtgaagcaagtaaacaaggaattgcaccagacgacgttgtttcatttattgaagagttgcagccctttgataaaatcaatgtcatcggcttgatgaccatggcaccacttgcttcttcagaagcagagcagctccattattttcatcagttgaaagaattacaagaaaaaatcgcagcgctgcacttggcacatgctccatgtacagaaacaagtatgggaatgagtaatgattttgccgttgcgatccaagcgggtgcgacagttgttcgcatcggcaccgcattatttcaggagtaaaggaggttgacatatgtctttaaaagagaaattgaccaatttttttggattgacagatgaagaagattattacgaagaaagcgtggtagctcaagaatctgtgcgatccccgcaaaatatcgccgtcaatcaaggtagttcttatgttgcaccacgcacgactcgtgctgaaaatccaacgaatacattttcacgaagccatatgccatcacagcaagcgcaagcgcagcgttcaacagcatcaagtgcgtcctttgaaagacaacaacgccctgtccagaagacagaggaaaaggtcgtttctatggcccaacaacgcagtaatcccaaaacaaaagaaataaagtccaaggctgcaggcaagattactatcgtagaaccaagagtttattcagaagcgatgggaatcgcgaaacaagtgatcaatggcgatgcagtacttgttaattttcatttaattgaggagtaccaagcacggcgaatagttgattttttgacgggaacagtgtacgctgaagatggcgatatcaagcgtgttggagatgaaatcttcttatgtacgccaaaaggaatggagatcgagggaactgctcaaacattagcagatagtaatttcttcgatatctgagtcaaggaggaaagcatattttagtctttaggttattaaatctattcagtgatgcagtatatctctatacagtattattagtgatctatgccttgctttcttggtttccgggaggataccaatcagcatttggacgtttcttagcaaaaatctgtgaaccatatctaggtttgtttgatcgtctaaatctgagtttcgctggcatcgactttacgattgcatttgccattatcgttctgcagctagcaacgcaaggtctgttcgttcttctacaagcaatcttattctaacgtaaggggtgaatatcgatgaacgcaaatgtctatcagcattttcgaagcgatgagcacccttttattgattctgcgcaaggctggatcgaacaagtgcagatgcaatacgcaccctatttaacagattttcttgatccgcggcaagcctatattttagaaagtctgattcggcaatcaaccgatttgagttttcaattttttggcggatatgaagctgctgaaagaagacggtgcctgatctacccagactattaccaaccagcaagtgaagaatttgatttggtattattcaccattatctatccaaaaaaattcacggttttaagtcatgggaaggttttaggaacgttaatgggcacaggggtcaaaagggaatactttggtgacatcatttctgatggggaaaattggcaagtatttgtggcaagcgaaatcagtcattttgtccaaacacaggtcgataaaatcgggaatgtctcagttcgcctcgaagaaacgaagtacacggaattgatcgtaccaaaagacggctggagcgaagaacgagaaacggtcagctctctccgtttggatactgtcatttctgctgtctataatatttcgcgccagcgttccaaacaactcatcgagtctggcaaagtgaaagtcaattggacagaaacattacgtccggattttatgttggatctactggatatcgtatcaatcagaggatttgggcgtatccagattcaggggttagaaggcacgacaaaaaaagaaaaagttagattgttattaggtgtattacgtaaataaaacaaagaggtgtaaacttatggcattaactccattagatattcaaaacaaaagcttttcagtaaaaatgcgcggttacaatcaggatgaagtcgatgacttcttagatatgatcgttcgtgattatgaagaagctgttcaaaagaaccgtgaactagaaaaatcattgaagcatgcagaagaaaaacttgagtatttcaatgaattgaaagatgcattgaaccaatcgatcatcgtggctcaagataccgcagacaaagtaaaaacgagcgcaagcaaagaatctgaagtgatcgttacttctgctcaaaaccgtgcagatgaattagtaacgaatgccgaaaaacgcgctcatgcattgacaacagctgcagaagaaaaagccaaagaaattctgacggatgcaaccaataatgcgcgtcaattggcaactgaaaccaatgatttgaagaagaaaacgcgtgttttccacaacaatcttttggttatgctgcaaacacaattagagcaagtaaaaagtccagaatgggaagaaattttggcgccattttctagctatgtaaaagattctcatcaagtaatcaaagaagttttatcaaaagaacttgacagcgaaaatgattctgaagtaaactcagaagcagtggagagtccagtagaaatcgtggaatccagtgagaaagaaattgatgtagaagaaaatccagaagtgaaaacattggatgatgcacgtcaattactagatgaattaaataaaacaaatgactaatatacagaacagaaaaatttcttatacttttaaagcgagtctgggagagtggaagccggataaaaccctgtaagaaattagatcatctgttagtcttggtcttgaacagtggtagagtccaacgtttgatctcgttaccgatcaacaaagaattgtcactgacaataaaatttgggtggtaccacgaacacgttcgtccctttccgggatggatgtgtttttttttatagcttcatagcctatgggcttattagaaggatttggtcgattcaatgagtgaattcactgaaattgaggcaggatagacaaaattgtttgatcgacatgtgcttgcacatgccataatcatgagtaatcagtaaaaggagcgaatacaatgaagatgaaagaaacattgcatctgggaaaaacggcttttccgatgcggggaaatttgcctaatcgcgaaatcgaatggcaaaaagattgggaagaacaaaatatctatcaacaaagacaagcactgaacgaagggaaaccaacatttgtcttacatgatggccctccctatgcgaatggcaatatccacattggtcatgcattaaacaaaattagtaaagacattattgtacgttctaaatcaatgtcaggattccgctcaccttatgtaccaggttgggatacgcatggattgccgatcgaacaagtgctgacaaacaagggcatgaaacgcaaagaaatgacacttgcggaatatcgcaaaaaatgcgaagagtatgctttgacacaagtagatacccaacgtgaggactttaaacgtttaggaatctcaggtgattgggatcatccttacatcactttgacacctgattacgaagctgctgaaatccgcgtattcggaaagatggcagaaaaaggctacatctataaaggattaaagccaatctactggtcaccatccagcgagtcttcattggcagaagcagagatcgaatacaaagatgtcaaatcaccttcgatctatgtcgcttttcctgtagcagatggaaaaggaatccttgatgaagatacatctttcgttatttggacgacgacaccttggacattaccagcaaacttaggaatttcagtaaacccaacgtttacttatgttcaaatcatggcagatggccgtaaatttgtaatcgccaaagatttgttggagactgttcaagcagctattggatgggaaagtgttgaaatcttgcaagaaattgctggagaaaaactagaatacatgactggccagcatcctttctatgatcggacttcattggtgatgctaggtgaccatgtcacgctggaagcaggtactggattggttcatactgctcctgggcacggggaagacgactacatcgtaagcaaaaaatacaaattagatgtcctatctcctgtcgatagtcgtgggatgtttacggaagaagcaccaggatttgaaggaatcttctatgataaagcgaacccaatgatcaccgatttgttagcagaaaaaggtgcattattgaaacttgatttctttgtccatagttatcctcatgattggcggaccaaaaaacctgttatctatcgggcaacaccacaatggtttgcttcaatcgatcaattccgtcaaaacatccttgatgaaatcgagaaagtggactggatcattccttggggcaaaacacgcttgtacaacatgattcgtgatcgaggcgattgggtcatctcacgtcaacgtgcctggggggtaccactgccgattttctacgccgaaaacggcgaagcaatcattacgccagaaacgatcgaacatgttgcaacgctatttgaacaacacggatcaaatatctggtttgaaaaagaagccgaagaattattgcctgcaggctttacgcatccgggttcaccaaatggcaaattctctaaagaaacagatatcatggatgtttggtttgattctggttcttctcatgaagcagtcttgcgtcaacgtccagagttgactttcccagctgacatgtatttggaaggttcagatcaataccgtggatggtttaactcaagtatcaccacaagtgtggcgatcaatggggaagcaccttacaaatcagtcttgtctcaagggtttaccttggatggtgaaggccggaagatgagtaaatctcttggaaataccattgctccagagaaagtaatcaaacaaatgggtgccgatatccttcgcctttgggttagcagtgtagattatgaagcagatgtccgagtttcaatggatattttgaatcaagtctccgaggtttaccgtaagatccgtaatacaatgcgtttcttattagccaatacggctgatttcgatccaaaaacggatatggtttcttatgaaaacttacgctctgtagacaaatacatgctggttcgattaaacgaaacgatcaaaaccattcgtgaagatgggtatgagaaatacaatttcttgcatatctataagacgatcatcaatttcttgactggcgatctttctgctttctatttagactttgcgaaagatgttgtttatatcgaagcggaaaatgatccacaacggcgagcaatgcaaactgtcttttaccaaacggcagtggctttgacaaaattgttgacgccaatcattcctcacacagccgaagaaatctggtctcacttaaaagaagaggaagcctatgttcaactagctgaattgccaagttatgaatcatttgcgaatcaagctgagttgcttgatatgtggacggcatttctttcattccgtgacaatgtcctgaaagcactagaagaagcacggaatgaaaaactgattggtaagtcattggaagcaaaagtgaccatctatccatcacaaccgctggcagacctattaacggctgttgatgctgatttggcccaattattgatcatttcaccagacttcttcgaaatcaaagaggcaggaagtgccgctccagaagcagcgttacaatttgaagatggtgcaatcttgatcgaaaaagccgatggtgaagtttgcgaccgttgtcggcaagtgcggacagatgtcggagtggatgagaaactgccaacactttgcgggcgttgtgctcatttggtggaagaatattatccagaagccgttgctgaaggctttgagaaataaaaattagctgagaaataaaggtaagccaaaaattatcagtgtgccgttggacgatctacttagatcgtccgatggcacacgttttttgtgatcatttcattgtgctgacttagttatcagcttttgtgtctttttcattgttttctcctagcaatagcaactagacgacagcaactgatgataagaagcatagaagtgacaaaaatgcagcgctaggcaatcgtgcttgctttgtcccaatcggttttacccgttcagcgtttttgagagaaagctagaccaacttgcagaaaaagattgcaagatttacatagaaaaggtaaactgttaaaaattggaatattcagaatatttaaagaaaggatgaggggatgagggaaaaagagacattaatgtatgatcctcgttttgaaagtgatgcttgtggcatgggctttatcgtacaaaaagatggattatactcgagaaaactgattgaaaatgcgttgacgatgttagaacgaatgaatcatcgtggcggaacaggagccgaaccagatacaggggatggtgctggtgtgttgatggcattacctgatcctttttttcaagcaattgctttagcggcagagattgttttaccgccgaaaggtcactatgcagtaggcatgttttttttgccgcaagaacgagaatccgcagtcaaattaagaaaggccgttgctcaggatattcagcaaatgggatttcgggtgttgtggcagcgggaagttccctatgactattcgcaatgtggtccaggagcacaaaaagtgatgcctagtttttgtcaattctttattgaaaaacctctcgatgtgacagtcggaagagattttgaggaccgtttgtatcatttgcggcgacaattagaaaaaaactatgcagccaaggaactagccatctgcagtctttctagccaaacaatcgtctataaaggcatgttacatgcttatcaggtcggactgttttattcggacttacaagatccgcgtatgacttccagtatcgcattgactcattctcgtttttcaaccaatacttttcctagctggaatcgcgcgcagccttttcgttttttagcccataatggggaaatcaatacgttaagaggagccgaaaattggatgcatagtcatcaaatcgaagtctatgatgaggaaaattcggactccgcaaaacttgagaattgcatggaattcttgtatcgccaagggagagatttacctcaggcgcttttgatgatggtacctgaagcctggtcgaaagaagccggtttgccagaagaactagttgcttttcatgagtacaatgctagttttatggcaccatgggatggaccggcagcgctttgttttacggatggtgagctggtgggtgctgctttggatcgcaatgggttgcggccttcccgctattcaattacgagggatggcttagttgtcgtagcatccgaatcaggggtggttgatctacccgcagcagaggtaattgaaaaaggggttttaggtccagccaatatgtttttggtcgataccaaaaatggcttgattttgagaaataaagagatcaaagaaaaatatgcgcaagctcatccttatcgcgaatggttgacagaaaatttgttaacgatggatgacttaccagaaccccctttttctgatggattatcgacagagacactacagcgggtatggaaacttcacgggtacaccgacgaagtcatccggacactgctgatccctatggctcagacaggagaggaaccggttatctccatgggatttgattcaccattagcaatcttaagtgaacgtccccagtcgctttttacgtactttaagcaacaatttgcacaggtaacgaatccaccaattgacgcgattcgcgaaaagctagtgatcggtacagaattatttctgggacgagatggcgatgttacaaaagatcttagccaaaattgccataaattaaaaatcgctagtccgattttagccacaagcgagtatctgaagatcaaacatctaaatcagaaacaacaatcggcggcagtcctctctactctttattctgtgactggcaatgagcaacaaacactgcaccaagcattggatactctttttaaagaaagtgaagccaaaattgatcaaggggctacgattctcgtgttaagtgatcgcgaacctattgcaccacaactaggtaagatggcaattcctgtcttgttggctgtttcgggtttgcataattacttggtgcgaaaaggaaagcgagcgcttgcctcactcattattgacacggctgaagtctgcgaagttcatcactatgctatgttagttggctacggtgccagtgggattcatccttacggggcttacgaaacgctgcattattatgacatgagtgatcatgtcgaaaattatcgacaggcctgtgagaagggactcataaagattatgtctcgtatgggaatttcaactattgccggttatcatggtgctcagctctttgaagctgtcggtatctcaccacaagtcactgagatttattttacgggaactgtttctcggattggcggcctgtcgttgaaacaaatcgaacaagagtattttgagcgatacgaagctgcctatggtgaaaaacaacaggattatctagattcgggaggcagctttcagtttaaagcagaaggtgagcatcacctttttaatcccaaaaccatctatcactttcaaaaagcggtgcgcacaggagattatcagttgtacaaggagtatgcagctgtcatgaatcaagaggctttaagcacacccacgacacttcgttcactatgggagttcacaccttcgcgtcagccaattccattggaggaagtagagcctgctgtccaaatcgtcaaacgattcaaagtaggagcaatgtcttatggatcgctaagtgaggaagctcataaatgtattgctgaggcaatgaatgccatcggagctaaatcaaatagtggagaaggcggggaacatcgcgagcgtttcaaagcggtcaacggcaaaaattacaatagtcggatcaagcaagttgcttctggacgctttggagttaatgcggagtatttaatgagtgccgatgagttgcagatcaagatggctcaaggagcgaagccaggtgaaggcggtcaactgcctggaaataaagttttcccttgggtcgctgagattcgcggatcaacccctggggttcgcttgatttcaccacctcctcatcacgatatttattcgattgaagatttggcacaattgatccatgatttaaagaccatcaacccttatgcgcgaatcaatgtgaagctggttgccagtacgggtgttggaacgattgcaaccggtgttgtcaaggcaggtgctgatgttgttgtaatatcaggctatgatggcggtactggtgcttctccccgcaattccatcagagatgcgggcttgccttgggaaatggggttagcagaagctcatcaaacattggcactcaatcatcttcgtcagcggatgaccttagaaacggatggtaaattgatgacgggaagggatattgcgattgcggcacttttaggtgctgaagagtacagttttgcttcattggcccttgttgcgatcggctgtgtgatgatgagagtctgcagtctgaatacttgtcccgtgggtattgccacccaaaatccagctttacgaaagttttttgctggtaaaccggaacatattattcatactatgtttttcttagcagaagacctcagagaaatcatggcagaactgggttttcgtaccattgatgagatggtggggaacacagaagtcttggtacctcgtttcattgccaaagggaaagcaaaatcattggatttcgctcgcatcttgggtacgacacttccgattgcacgtaaagtgacggatccttttttggagaaacgacaatggccagaattggatagttttgccaaagcagcaattgaaaaacaacatcctgttgctatcagtcaaccgatcaacaatattcaacgttctgttggtgcccgcatagggggatggattgcagaacgctttgggaactatgaacttcctccaggattgctgcaattcaattatcaaggaattgcgggtcaaagttttggtgcctttgcaacgcaaggacttgagctgagattggttggagaagccaatgattacgtagccaaaggattgagtggtggccgtttgatcattgtaccgccagcagatgctagttatgatattgaacagtcgcccattgtaggtaatgtggcttgctttggggcaaatcgaggagaaggatatttcagaggtctggcaggagaacgtttctgtgttcgaaatagcggagccaaagtggttgtagaaggaatcggcgatcatggctgcgagtatatgactggaggtgtcgctgttattctaggcaagacgggccgcaattttgctgctggcatgtctggaggtgtcgcctatgtgtacgatccggagcaagcgtttgctgctcaatgcaatttagaaatggtggaattgtttaaggtagatgagagcggggatgatgcggtattgaaagaattgatcgagaaccattttgcctatacagattccttaaaagcagccgagattctaagcgattggctctatcataagcagttgttcatcaaagtttatcctaaggaatatcatcaaatggtggaagcgactcatcaattggcgcaacaaggtctctcaggagatgaactgatcgctaaagcttttgagtcagttgtcggtcctcagatgacgatcccaggaaaggagcatgactagtatggcagatccttttggtttcttaaaataccctcgaaaagaaaatccgtatcgtccggtagcagagcggatcactgattggcaagaactgcaagaaccattgccagcaagtgagcggcaagaacaagcagcaagatgtatgaattgtggcattcctttttgtcataccggttctttctatggtgggcaacggacagtatctggatgccccaacgataatttgattcctgaatggaatgatcttgtttatcaaggcaggtttcaagcggcttttgaacggttagcgaaaacgaatccattacctgaaatgaccggacgggtttgtccagctccttgtgagaaaggctgcacggaggcactaaatgggagcggggtcacgattcatgacaatgagcgtttcattatcgacactgcatttgagaatgattgggtccgagcatcgggagaaccgcaagcagcaactggtttcaaaatcgccatcattggcagtggaccagctggtctatccgctgcttggcgcttgaatcagttaggtcatcaagtgacggtttatgaacgcagtgatcgttgcggggggttgctgatgtatggtatccctaatatgaaactagataaaacagtggttcagcgcagaatcgatttgatggcagaactaggcgtgaggttcctaacgaatgtcgaagtcggccgcgacatttctgctgaagaattagaagctgcttatgatcgtgttattatttctactggcgccagtgttccgcgggatttaaagatctcaggaaggtctttgacagggattcagtttgctgttgattatttgacagcagcaaccaaagaggtattgaaccatggaaaagctgcgaatgaatccttggcaggcaaacacgtggtcgtgatcggcggcggagataccggaaatgattgcttagggactgcgatgcgccaaggggctgcttctgttcgtcagttggaaatcacgccacagcttccaccacagcgtttagctgaaaatccatggcctgaatacccaatgacagctaaaatcgggtatggtcaggaagaagttgctgcggttctacaggaacatacgtatcacagcatttcgacaactgcttttgtaggagcggaacggggacaggtgattgggattgaaacagtcaaaatagatgagaattttcagccaatctctggtacagagcaagtgatgaaagccgatttagttttgttggcaatgggcttcttaggtccagaaacacacttgttagacaccttcaatgtccgtgaaatctatgatgattatacaaccaataatgaacgggttttagtagctggtgatgcaaaaagaggtcctagcttagtgatttgggcaattcgagaggggcggctcgccgcggagaaagtcgatcaatcgctgagggccttgatttatcaacaaatttagcaaaaacaacgggaaaaatgcgacagataagacaaataaaccgaaggctatctctgaaaagcgatgcgcaatcttgcgcgaaggacgaatcgtccaagaagcttagcaggtatccttcggttttgttgaatctttcgtcacatagcagatactttgtactgtgcccgcggtccgccgatatatttggggcgtgagcctaatgcagtcacatgagctgcacctaacgttttgatacttggccgaatagggatctgtacgtgtttgacatgcatgccgatggcagtatcaccaatatcgatgccagctttcgcaacgatatgctccacttcaacgggatcaacaaacaagcgaaatgccgctacagaacaagcacctcccgcatgaagtgcagggacaactgccacttcttctaattgataatactgagcagtgctacgctctacagctaatgcacggttcaagtgttcgcatccttgaaccgctaagcgaatgccaagcggatccaacacctctttaatggtcttaataatgatgtagcctacttcttcgctggattttttgccgatcatcccgccaacgacttcgctagtagaacagcctaaaacaaataaatcattttgcgttaagtgtgctgcgtcaattacttcagttgtgatggttactaagtcatttttaagttgatgaaaatcattcattggaatcttacctctcattcaaagaaaatttttgcgttcgttttaaataattgacaagcggaaatgctaccaatataccaaaaacattttgaaggctattgctgagaatcgaagcaatgcctgctccaaagccaaacatgatggtcgttgctgcggcatagcctaaaatcatcgtcacgcttcccaaacaaagtgtcagcaggggatagtgacgaaaacgaccagtaatgtagccttggcagccatggatcaaaatagaaaacaatgcccattctggataaccggacaaaaagtcgatcattccgccgctcaagctgccgacgatcgcacctgaaggaccgcctaataaaagagccgtggtatagatgccggcttcgcaaagggtcacgacaccttttgtctgaggaactggcaggacaaataataaagaaagagcggtagtcagtgctgtcagcatagctaaccttgttagtttcttggtagacatgaggtaactcctttcctaaaataagcaagttgatcgacatttcctaaagattctgtcagctgtagcccattttcaatgccggcaaaaacaaagtctttggcttgctgtacagcatctgtcattgagcggtcagtagccaagagcgcagcgatggcagcggataacgtacaaccggcgccgttcgttgtctgtttgggtgattttggtgtctcaaaaaagaaaaagtcatccccatcatagagcaggtcgcaggcttgctgcccgttcagacgagcgccacctttgatcaacacaaaagcaggcccaagtgctttgatttttttggcagctatcttcatttcttcccgagtagtaatggcttgatttgcgaaatattctgcttcaaccaaattgggagtaacgatagtggctaaagaaaataaggattgcagggcgtgttgatactcttgattggcttttgtctgtccttctttaaaagctaagactggatctaagatgatcgggcagtcttgggtcactaggaaatttttcactaattcgatcgtttccagtgtatgtaataggccgattttgatggctgctaaacgggtgaaagctgtaactgaagctaattggtccttcagcgttgcaggagggatatcataaatggtgatttcctcattgatggctgcgacacaagtgagcaccatgtgaccaaaggtattgaattcttcaaaggtcttgatatctgcagtggcaccaccacctgctaagctgtctaagccagcaatggtcaatacttgtttcattgattcacatcctttagtctttcgttttattatagcgaatggagcaaaaataaaaacagccaattggctgtttttttacccatccaattggctgctgcttattgattatttagtaagttccgttcacgataccattcatctggtttccaaatccattcaaagccatcagctgctaatagatcataggcggcttttggtcccatggtccctgctgaatagttcggaaaatcaggtgtttctttatcccaagcatgtcggatgacatcgacgatgcgccatgattgagcaacttcgtcccaatgagtaaagttggtgccgtccccattcaaagcatctaagagcaatttttcataggcttctggcgtattttctacgatttcagtactattgcggtaatctagtttaacaggaagggtgtcgaatccttgaccgatttctttgccatttagagaaagtgaaaagccttccgtcggttgaatataaatcgtcaagacattaggtgctaatttcttcttgctttcgcaatcagtcacatctttcttgaaaacattcactggaacttgcttgaaaacgatattgatacgggtgcctttctctgttaaacgtttccctgtgcgtacataaaaagggactcctgaccagcggaagttgtcgatcaaaaacttgcctgcgacaaatgtttcggtggcagaatcttccgcaacattcatttcttcacgatacccagcaaactgctgatcctctaattgcccgtgagcatactgtccgcggacaaaattggttttgacttcttcttctgaataaatgcgaatcgcattcaatgctttgattttttctgtacggagttctttttctgagaaagcgactggtggttccatagctagcaaagagagaatctgcaagatgtggttttggaccatatcctttaaggcaccactcttatcataatagccgccgcgttcttcaacgccgagatcttcagcgatattgatttgaacattgtcgatatagcggttgttccattgcgattcaaaaatattattggcaaaacggattgcagaaatattttggatcatttcttttcctaaatagtgatcgattcgatagatctcttgctcactgaaaacttgattgatttcttcgttcaattgtttcgcagaggcatagtcacttccgaaaggtttttcaatcaccacacgatggtagccttcggtttcaagcatgccttgtgattttaaatgtgagacgatggtaccaaagaagtttggagacattgccagataaaacagttggtttccttcaagctgatacttctgatctagagaatctgccagctctttcaatgagtcatagtgagtggtatctgtcacatcatgagactgataataaaaatgtgaagcgaaagtctcagcttgttcttttgactcgatcaaatcttcgatcgttcccataacaacttcacggtaatgttcatctgaccaaggacggcgagccgtaccgattacagcaaaatcttctttaagatcgccttttttatacaaacggaagagggaagggtaaagtttgcgttgtgcaaggtcaccggttccgccaaaaatagtaaaaagcacctttttttccatcgttttcactccttacaatttatctacaaaaatcgtactagctgctttataactgacagcaatttctttatccgcatttttaatggtgatcggtccttcgtaggcagccgtatcaatgatctcaaactcttcatgaatattcaggtcgatggctaccagatagtccaacaattcccgttcatccaacacgcgagcaattcggatctttgtcccgacagggtaagcactcatcgtcgttttttctccttcgtggacgggttgtccctgttcggggatcattccgccgtgaggacaaaacttaggatgtcctagataggcttctaaatgatcagccaatgtccctgatgtgacatgttcaagtacctccgcatcatcgtggacttcattccaagaataattcaaatgctccactaaaaatacttcccataaacgatgtttacgaatgagagcacttgccgaagctagtccgctttcggtcaattggacgccttgataaggagagtgttctactaagccttcttttaaaagcttagaaatcatctcgcttactgaagcagcagacacatccagaccagaaacgatttgtttgttgttgattttcttctgatcaccgcccaattccaagatgagcttcaaataatcttcgcggtttggtgtcatggtattcatcctctcttatcaaagactatcaaactaaattctatcaaaaaaagccacagattactacggaaaaaaccgtgggaagaaggttttttataaaccgctttactttattcgcttattctgacagtcagtttttttaagaagaagaaaactgagagaatgattcatcctctcagtctttttagtgtgtattaagcccaatcgccatttctgaatactgggactgttgtgccatcttctttgattccatcgatggacatttgggcagatcctaccataaagtcaacgtgtgtttggctgcggttgagaccagcagcggccaattcttcttcgctcatttctgttccgccttgtaagctgaatgcataagccgaaccaagagctaagtggtttgaagcattttcatcaaaaagggtgttgaagaaaatgatcccggattgtgagattggtgaaggatcaggaacaagagccacttcgcctaaatgttttgcgccttcatcaatggctaataattttgctaaaacttcttctccttgttctgcagagaaatcaaccactttcccatctttaaaggtgaacttcatcccagagatgatcgttcccgcatagcttaatggtttcgtacttgagatatagccatcgatgcggcgactatcaggagcggtaaatacctcttctgttggcatgtttgccataaacttttcgccacgggcattgaagctgccggcaccttcccataaatggttctttggcaagccgataataatgtctgtgcctggggcagtataatgcaacgctgtgaattgttcttcgttgagttcattggctttttcttgcaacgttttatcatgattcttccaagctgccacagggtcttcttcatagatgcgcgttgttttgaaaatttgatcccaaagcaagtcttgcgcttcttctggtgttgcatcagggaagactttttgtgcccaatcttgaccagcggctgccacaaccgtccagctcactttgttggcttgggttgcttttcgcaagttaatcatggctttccccgaggcggcttgataagtcgctacgcggtctgaatctacacctgctaatgcatcgggattggctgaaaccacactgatacggctcgcaccttttgctacccaatcgtctgtttgatcgattttgtattgaggaatcgtttccaagcgatcgctgtcggcgtgggcaagaaattctttttgaacgacatcatctgtccattgaacgatgacttctgctgcccctaatgcataggctttttttgtcaaaaggcgagccaaaggtgcttgatcaacagcgatttggatgacgatcgtatggcctttttgaacattgacgccaacttctgtgattagttgggcatatttctcaagattttgattaaaatttggtaaaaccattaaaattcctcctaatttttctaactataactttctctatgatagcactatttttttttgaaaacaaatgaaatcgaagtcaaaaaaacagattttttcatgctgaattggaagcgaatagggactaggacaatcttaaaagttgttttgcaatcttaaaaaaacatgatacaatgaataaaaggtttttctgaaagcgatgtatagcagaattaaggagattaaaaaattatggcaagaaagaaaacaattactagagaccagattttaaaagctgcctatgaagttgtcgcaaccgaaggattcacacgttttaccgcacggaatattgcagcgaaaatgaagtgttcaacccaaccgatttacttagaattcaaaaacatggatgaccttaaaagtgccttgatcaatcaaatttatgattatctagcaacagaagtatttcccattgagagacgtggggacgtgatcgtcgatctgactttgaattacattggttttgcgaataaagaaaaacgcttgtatcgcgcgctttacctggaagagtatggcggtggcgattccatgcaaaaattttcttttgatttattcgtcaaatctgtgaaaaaagatccgaaatatcaggatttaacagaagtcgaactgaaatcattgcatacgggtgtatggatcgttgccactggattagccgcattgatgtcttcgggaattcttcatccgacggaagaccaaattgcaaaattgatgaccgagaccgcagaaaatatcattcatcgagaaacaccgattgatatttcatacaagtcattcgatcaataattaaatcatacgtaaagagaaaaaagcatgtacccagcgtgggatacatgcttttttatgtatgcgcatcaaagagatgcaacgatttttttcgcaaagtcttctaagttttgaatgtcttcttcttcggcagccaaatcaactttgacgctttctgctcctttgatagcaccggtcttggcaaaagctgcttcaaaatcatcgacagatttgcaaaaatcatcgtagaacgtgtcacctgaaccgcaaacaccaaatgtttttccactcaggtctaattcttgcaagtcttcatagaaatcaacgatctcgtctggcagttcaccatcaccataggtataagtggctacgatgcaaatatctgcctcttcgaattcatcggcatctacttgcgtacattcattgatatctacctcaatagccagattttcaagtgcttctgcaacgatatcagctatttcttcggtgttgcctgtcatgcttgcgtaaacgattttagctaaagtcataaataagtcctccgatcctttaacggtcaacagtaaaaaccctctctgattatagcaaacccagtcaagaataacaattcttgaaaaaagtcttaggtgaatcagcagactttgtaaaattcttgctttgtatggtaaaataagaggaatttaaataagggagacgagaaaatgataacattaaaatctgccagagagattgatcaaatggctgagtccggcgcattacttgcggacgttcataaacaacttcgtacgtttattaaaccggggatcactagctgggatatcgaagtatttgtgagaaattatattgaaagccatggcggaatcgctgcacagatcggctttgaagattataaatatgcgacttgctgcagcatcaacaatgagatttgtcatgggtttccccgaaaaaaagtattaaaaaatggtgatctgatcaaagtagatatgtgtattgatctaaaaggcggaatctccgattcttgctggagttatgtcgtaggtgaatcgaccccagaaatcgatcgtttaatggaagtaacgaaaaaagcgatgtatttgggaatcgaacaagcacaagttgggaatcgaatcggtgatattggtcatgcgatccaaacgtatgcggaaggtgaaggctatggtgttgtccgtgattttgtcggtcatggcattggtccaacgatccacgaagcaccaatgattcctcattatggcgaagcagggaaaggcctacgcttgaaagaagggatggtcatcacgatcgagccgatgatcaacacaggaacttggaaaatgaagatggatccaaatggttggacagcgtacacacttgatggtggattgagttgtcaatatgagcatagcttagctatcacaaaagatggtccacggatcttgacttctcaaggagaagaaggaacctactagaaaagaatggacggatgtcggaggaaccccaaatgaaatggatcgataaggcgaaaagcaatcaaaagcttatgcgatttatagaaacgacacaaacgcggatcacggaatctgaaatgggaacgacctcagttgtcgtagcctattatttattactatccttgtttccattgctgatcgcgatcggaaacttgctgccttttctttcaatcgctcctagtaacgtgctgccctatgtccaagaattgattcctggtcaagtgtatgaatttatcggaccggccattgagaatttgctgacttctggttccggcggcttgttgtctatttcggcacttgcagctctttggtcagccagccaaagcatcaatgcattacaaattgccatgaacaaagcgtttggtgtcgatcagcgttcgaactttattgttgttcgtgcggtctcttttgtcattattctcttgtttatgattgcaatcgtaggtgtgacgatggttattggtttagggaagatcattttggactttctacaaccaatcttccatattcaagatgatttgattgctaccttccaaactgtcaaatggcctttgacgatcattgcgttgctgtttatcttgatgctaatctactggttggtgcctaatgccaaagtaaaacttcggtcaacgcttcctggcgcagtatttgctacggcgggctggatgttgctgtcgcaagtgttcggcttatatgcccgcttttttgctgctaggatcagcggctatcaaatcatcgggagtttcattgtgttgatgatttggctgaatctggcagcaacgatcattattttaggcggcatcatcaacgcagttgtggaagaatatttatcgggacaagagatcaaagaacgaaaagatcccgtggaacgtatctcatcaaaacttgaagatacattttccaataaggagaaataaatgaaagtgagaatgagcgatggaatttgcatttaaatttattgtacgtcttttcatcacgatgatcatatctttgatattgacgcccatcattaaattgatatcctttaaaattggtgcagtcgatcgcccaggagaacgacgaatcaacaccaaaacaatgcctacagcaggaggacttagtattttcctgtccttctcttttgccttgctttgggaatttcgcgaaatgatcccatttaactatgtctggccaatgctcttaggagccgcgatcgttgtagtgactggtttgcttgacgatatctttgagctctctccattacaaaaggtctgtgggttaacgctagcggctttagaaatctattttgtggcggggatcaagatcagtactgtgtcgattccttatatcggtgtattcgatttagggtggttaggcctgccaatgacaattttatggatattggcaatcacaaatgctgtcaatttgattgatgggttagatggactggctagtggagtatcgatcatcagtttgataacgattgggattatcagttacttctttttgcctgattcagtagctgtttcaatggtgatctttactttagtcgctgccatcgtgggattctttccctataacttttatccagcaacgatttttctgggtgatacgggtgctttattcttagggtttatgatttccgttctctcattgcaagggttgaagaatgcgacgtttattaccgtgatcacgcctatgctgattctgggcgtaccaatcaccgatactgtctatgcgatgattcgacggaagttcaacaaacaaaaaatttcttctgctgataaaatgcatcttcatcatcgcttgctttctttaggatttactcatcggggagcagtattgacaatctatgcgttagcaatggtattttcttttattgcactgttgatgaactatgccagtaatacggcaattattctactgatcattagtaccgcatttgggattgaattatttattgaattgattggtttggtgggagagaatcgccaaccattgatgtgcgccttgaaatttctaggtaatcggcgctttcgtcaggaagttttgactaagagaacaggcgactcactagaaacaaccgaggagccaataaaggaaccaacagaatcaaaaacccctcagcggacctcgcgcagaaaacgacgggctaggcataaaaaataatctcggtccatcagtaaaagaacgatccttacatgacatgttcagttgaagctgaaagtcacgtgtgggtcgttctttttttgtatctatccctaaaaggattgtttgcgcaaatcgattatttcaacgttacgatcgacaacgccagattctgtttctaacataatcgattggaaacgctcatttaaattaagctttggttcttggtcgaaataattggctgtatagtctttgatataaataggtccaaccgcagatgagagagtaatggtgtaaggtgcgggaacctctttgtctgagaccagcaagaaacgaaaacttgtatcgagagaacagatccctaatttcgaataaggtccgacaccgtcatccagatccagcagtaaagcaccctcattgctatgatatccttctagtttgttgatgactgcttgtgacatttttagttccatcatgtgttcctccttctttctcttcaatttcattctaagagcatttccctcagaacaaaagtaatctgctttcagcttattgacgtcttgaggctaaaacgtctatactgaatgagaagttatttcagtgaagaaagaaggatggtcaatgccaagtgtacagcaacgagaaacagaaaaaatgggaacagtttatgaagttgaaaatgatagcggtgtcaaacttgtaacaagcccggaaggagcacgcttactggattggatcgtgccgattgatggcggccgagacttagttgttgggtatgatacgatcgcaggacaccagaaagcgcgttactatggcgcaacgattgggccagttgccggcagaattgcaggaacccgatttactatcgacgggaaagagtatcaaacagaagataatgataatggcaatacattgcatggcggatttaagggattggataccgatacttggaaagctgaaacatttgaaacagaaaccgcagctggcgtaatttatcggacagaacgcaaagacggcgatagtggatttccgggcaatgtttcatacacagtgacttatacattggaaaatgatgattcatttacgattacttacgatgccacaaccgatcagcctacactatataatcccacgaatcatggctatttcaatttgaccggtgacactagaaatccaatcgatgatcacatggttcaaatcaatgcagaatatgtggctgaaacgaatcctgatgtcacaacaacaggaaaaaaacaacctgttgctgatacgaagtttgactttcgtgtagcgcgaaaaatgggcacaacattacttgatgatccattcttattggatcatactcaggactgggacttgaaagtgacgagccctgatgaaaaagtttccatcacagttacaacggatcgaccggctgtagtcatctataccacacgagatggcgaagaaggagcaccaatgaaaaccggaccttttgcaaaccatggcggaatggctattgagacccaaggcgttcctggaacagaaaaatatcctcagtttggggagatcctcttacgtccagaaaaacctttccattctgtgactcgttatcgtgttttttattaatcatagataatatatgacctctgtcagttgatctcaaacactgcagaggttttttttgacaattttcgattacggatgtaaacttaaatcgtgaacaagcaaggaggaaaaaatatgcaatcatcaagtgctcctataaaaatcagtgattccgaatgggagatcatgcgagtgatttggacattaggaaaatccgatgcccaagaagtcacggcacttcttagcgaatccaaagactggaaaacagcaaccgttaaaacattactaggccgtctagtgaaaaaaggcgtattgcggacagaaacccaaggaaaaaaatttgtttattatcctttggtttccgaggatgctacgattcaaagtgccacagagagtttattctctcatatctgtgcaaaaaaaatcggccaaacattggcagaaatgattcgtgaatcggaactaacgaatgaagatctaacaatgttggaagaggcactggcgcaaaaagaaccggtagccgctattgcttgcaactgtataccgggacaatgtcaatgtacaatgaatgaaggagaataaatcatgaaaaaaatctatcacattgaaggaatgagctgcgaccactgtgttgctcgggtagaaaaagcattgtctgaagtgccaggtgtcaaaaaagcaaaggtaaatttaaagaaagccaatgccaaagtcaaatatgacgaacaacttgttacagatgaagacatcatcgctaaagtaacggaggtggggtacacagccacggttgaataagtctctcgctgctgttcttgaaagatatggaatgaaaaaagttcatttaattgtttgcggaaagacggtaggcaacttctgtcaccccccaacgcgttccagcagggcgcaaaactttccagcaaaaaggaggagtttgagatgagccataacgaaatggacggaggacattcggaaatggatcacagtaagatggatcacagtaagatggatcacagtaagatggatcacagtaagatggatcacagtaagatggatcacagtaagatggatcatagtaagatggatcatagccacatggatcatggcatgagtggaatggatcatagtatgcatatggggaatttcaaacaaaagttttggctttccttggttttagcaatcccgattattcttttatcccctatgatggggcttgaattgccttttcagttcacttttccagggtctgactggctagtgatgattttagccacgattttgttcttctatggcggtcagcctttcttgagcggagcgaagatggaactgcagcaaaagagtccagcaatgatgacgttgattgctatggggatcacagtctcttatgtctatagtatttacgcgtttatcgcgaatcatttcatgcatggcgcacatgtcatggacttcttttgggaactggcttcattgatcgtgatcatgcttttaggacattggatcgagatgaacgctgtgtccaatgcagggaatgcattgcaaaaattagctgaattattgcctgatgaagtaactcgcaaaaaggcagatggttctgaagaaaagataccactggacacagtgaagaaaaatgatcgtttgatcgtacgagcgggtgacaaaatccctacagacggtatcatcaaagaaggggcaaccacgattgatgaatccgcagttacgggtgagtcccgtagagtagcgaaagagtccggttcgaaggtaatcgggggttccgtaaatggaaatggaacgattactattgaagtaacaggaaccggtgatgagagctatctttcaaaagtaatggaaatggttcgtcaagcgcaggcggataaatcaaaattggaagctttgtcagataaagtggcaaaatggttgttctatattgcattggtcgtcggaattaccgcatttgtaatttgggtgttcgcagcggatttgccaacagcgctggatcggatggtaactgtttttgtcattgcctgtcctcatgcacttggattagccattccgttggttgtcgcacgttcgacatcaattgctgctaaaaacggcttattgttaaaaaatcgtaatgcactggaaaatgcccatgatctagactatttgttacttgataaaaccggtactttaacacaaggaactttctcggtcacaggaattgaaagctttggtgactatacagcagatgaactactagcctatctagcagggctggaacaatcggccaatcatcctattgctgatggcatcttagcgcaagcaaaaaaggaaaatgttcagccgaaggaagcgactggaatccaagcgcattctggtatcgggatcgaagggatgattgctggggagaaatggcagatcgtcaatcaaaaagggatcgaaaagtatcagacaaccattgatccggaccaattgaataaatatcaagaacaagggaacaccattagctacttggtgaaaggcaatcaagtcgaagggctcgtagctttgggagacaaaatcaaaccagaggcggtaaaattcatcgaaacattgaagaaacaggggattacaccagtgatgttaactggagacaatcaagcagctgctaaggcagtggcaacttatctaggcatcgatgagtattttgctgaattattgccagaagataaagaacgaatcgttgctgattatctgaataagaaacaacgggtagcgatggttggtgatggtatcaatgatgcaccaagcttggctcgggcaacgatcggtattgctatcggcgctggaacagatgtcgcgattgattccgcagatgttgttttgaccaatagtaaccctaatgatattctgcattttcttgagctggctcataaaactagacgaaaaatgattcaaaacctttggtggggagcagggtacaatattgtgacgattcccttagctgcaggaatcctagcaccaattggtatcattttaaatcccgctgtcggcgccgttttgatgtcactaagcacaatcgtagtagcaatcaatgctatgacactcaaaattgatgagtgacaaaaaaccgaatcgtttgtttccattgattctcttgtaagcaggagaacgaccgaaacaaactgattcggttttttagtcagttgagaatcgaagattctttggtaatttaacggcaaagccgtcgaaataaacctacaatcgaccagtgactttatgctataatgtgttcgttgagacaaggaggacgttgagaatggaactgaagaagttagaggttcccactacttcgatcactgaagtaaaaaaatctccgatggatgtatttaatcaagcgagagaagcgggaacagcagtatatgtattcaatcgtgaaaaagtggcgggggtcatgctgacacaagagcaatatgaaacactcttacaggaactggatcaacggccattagcggaagaagagccggatcaaccagctgtggcgggattggaagaattcttacagattatgcggcaagcattgatcacaggggcaacgatttctgcaaaaaatttggacgaacgaatggtcgcattaggctttattacccgcaaaacaggctttggcggtgtagttgacatgatcaatgaattaaaagaaaccggaaagattgtctatcaattgcgcaaaaagcccgatggaaaatctgtcagtgccgaagtcatcggcgagcaagacaatcaaacgcagctttttgataaattgatcatcaaaaaaatattccttaaagaaaactaacagttatgctgcagcataactgtttttttgcgtaagtgtaatagtgtgagtttagtcgataccgatagaaataatggctgagacaaaaggtgtgaaaaagatactcctgattaggatcaaaaagtaccatcagataacagctaagtctcagcctttttcagcgacccactaagcaaccgtcaaccaataggttttaccatctttggttcgctgcatgaatccgtattcgatcaaatagcggcgaacagtgacgtagtcagcaataaactgtttcaaaatatcattgacggcactttcggaataatttttctgagaatcaaatttttgagccaaaacactcaataccacgattttgcgtttttccttacttgggaattgatgaatcaccccatcttgatcgaagtaagtcgcaatgattttttctctttcttcgctggtgattgcataacgatcatccaacatggttgctcctgtatggggaagaacaaaatcttgttcctctaaatgtgccataatacttaaaaagactttcgcttgccgttctttttcttttaatttaaagcggtgatttcgtactgtcgaattagagatacctagacgttgcgcgatgacggcatcgctgagtccttgcgcaaataatgataagatctcttgttggctttctgacaaacctgtctgctcgcgacttaatgacagcaatgcattcagtaaaccaccatggacctcatttagatgtaataagatgcattttttggcggtataaaagcgatcagaggttggataaatctgtcctttttcataattaacatcgcagaataggcattgataatgtgtttttgtggaacgatacccatgttcatagtcagacaaagaggtggcgggaatagttttcactttaatcatctccttttgtttgtttatatactaacgtttataaatatcgtttgcaaatatataaacagatggattttttattttttgttttagcgaaagtattaaattacggatcaaaatgtgataggattaacagcaataacaaaaggtaactttgtgtggataggagtgatacgatgacagatgtcagtcaacgttttaacaaagaagtctatcaaattgctgtttctttgattcgaaaatttgatgagcgggtatctggtataccagatattttgaaattaacattaggcgaaccggatttcaatacaccggatcatgtcaaaaatgctggtgttcaagcaattgagcaaaattacagccattactcaggaatggccgggttaacggatgttcgagaagccgcaagcctttttttaaaagaaaaatatcaattgagttatgatccgttatcagaagtattagtgactatcggtgcaactgaagcaatctctgcttctttattagcaattctggaaccaggagataaagtccttttgccagcacctatttatcccggatatgagcccgtgattcaactagctcacgctacccccatttatttagataccacagcgaacgattttgtattgtcaccggagatgttggaaggggctttgattgagcatggggatcaggtcaaggcggttatcttaaattatcctagtaatccaaccggcgtggtttattctcgtgaagaagttcaagcacttgcggaagttctgaaaaaatatcctgtgtttgtcgttagtgatgaaatttatagtgaactttcttacgacgcacctcatgtatcgatcgcagaatatttaccggaacagaccattttgatcaatgggttatcaaaatcacatgcaatgactggctggcggattggttttatctttgctcccgttgccttaactgcccaaattatcaaagttcatcaatatttagtaacggcagcctcaacgatttcacaaaaagcagctgtaagagcgttagttgaaggaatcaatgatgctgcagttatgaaagccgagtaccgtcagcgacgtgattttctctatgaaaaaatgacagcattaggttttgaaatcgccaagccgtcaggagctttctatttatttgcaaaaatcccaaccggttatgaacaagattcgatggcattctgtgttgatttagcagaaaaaaatcaattagcaatcataccagggattgcattcggacccgaagccgaaggatatgtacgcctaagctacgcagccagccaagagaacctgcaagaagccatgaagcgactaagtaattatatgaagaaacaaccaaatcaataaacacatcagagcgtcccaatgggacgctcttttgctgcgaatcactgcgattgacactcgaagagtggcagagcagatgatgagcagtactaggcgatcaaagagagcgtagtcacattcaaatgaatcactgcgattgacactcgaagagtggcatgtaagttcgtcttagcgcaaacacgctagaagccagtgcgaagcaaagtaagtgtagccccaatatggagtcataaagaacaacacacagcggcacttgtaccttttgctttttaagaaggaaccaggcaagctcttttcacttcaatgaaaagagaggaacaatgacgagcgatacattttaatgtttacaaaagatttacatgggtttatctattctttactttaaatcaatcatgggtttacaaggggttgctaaactaagcatataacgaaaggagatttaacaaatgaaaaaactgggattcttaattttagcaacaggactattactagctggctgtggaaatagcggatcaaatgctgctgatagcggtcaagcatcaaatgaatcaagtgcttcaggagcagcgtctggaaatgtagaaattttggctgttggatcaactgcactacaaccattagttcaagctgcacaagaaagtttcacctctgaaaatccaaactatatgattactgttcaaggcggcggtagcggcacaggactgagccaagtagaagctggtgctgtaacaatcggtaattctgatgtttttgctgaagaaaaagacggagtagatgctagcaaattggtagaccataaagtcgccgtagttggaatggctcctgtagtgaataaagaagttggtgttaaagatatcagcaaacaggacttgattgatatcttcactggtaaaaccaaaaattggtctgaacttggtggaaaagaccaagagatcgcagtgatcaaccgtgcatctggtagtggtacacgggcaacatttgaaaaatggggacttgacggggccgaaacaattcaaacccaagaacaagactcttctggaacggttcgcaaaatcgttgcagaaacaccaggagcaatcagctatcttgctctatcttatctggatgattctttacaagcattaacgattgatggtgttgaagcaactccagaaaatattgctacaaatgactggaaaatttggtcttacgagcatatgtatacaaatggcgaaccagatgcaaacgtcaaaacatttcttgattacatgttgagtgacgatattcaacaaggtgtcgtgaaagaattaggatacttaccaatcacagaaatgaaagttgaacgtagtgttgaaggggaagttacgaatataaactaagaaactatagttatcaatgaatagtcagagacgaaaagggcaaataaatgccctttttttctgtatttttatgcttttttcctataaaatgaaaaggagtaaaattgaaaggggaaaaaaatgtcaaaacagacaaaatactttgtatatatttgtgcacttttgccgctactgtttttaggaaatacaggaactgttttagctatagaaattgaaagcagcagtcaaacacttactacagaaacaatgaatgaaacaagtgcctctaacacctcaacgacggatagcacaagtaccgtgtcgtcagatgcagagggagcttcgaataccagtagttcagaaaagagtagtcaagaaagtacaaaagaagaaacacaagcttcagatgaatcacagcaagaaacacaagaagaacccgaaaaaatttatgatgttcaaggtggacttgatccgtcgagcagaaatcgttccgatttgaaagaacaggtgggcattcagcggcgttctctgcgttcagcagacgtcgcgtttattgaagccggagacccatcgactcctagtcaggattttattgatgtctcttctcacaatggcatcattagcgtggaacaatacaagattatcaaaagttatggtatttcttccgtggttgtgaaattgacagaagctacttcttatcgcaatccattagcagcatctcaaattgcgaatgctcaagcggcaggactggtagtacatgcttatcattacagttggttcacgacagaagcgcaagctaaagcagaagccgagtattttgtcaaatatgccaaagaattgaagctgccaacctcagctttgatggttaatgatatcgaggacaatcaaataatgggaaaagcagatcatactgcactttctaaagtatttgccaatcgtatcaaagaattaggctatagtaatacccatcattacactggggtactttgggtcactcaaaaagcgatcgatcctgctgcacttggctatagtaatgtctggatcgcgaattatccgtatgttcctgcaggacaaaaattcacggaatatagtgcatggcagtggacctataatctttctttcccaggagtcagtgggaccttcgatatgtcttctgactatcagaaatactttactggtcaggggcaaggaggagcaataccagacaaccgctacgctacgattacgaaagataactacacgatttggcagaatttttcttggaagaaaaaagcagattcaaaagattatttgggtcaaacgttacaaataaaatatcgttacgagcatatcaatggtagtacgtatttttctgtgtacgataatcaaggtacttggataggttatattaatgctggtggaactaagacaactgatggcgcacaaggaagttggcagtcaaaagaaacgtatgtaaagtttcgttcgaccggaacggtttatcgcaattttaatttcgattccacagcaatagtatcagaagaaatgttgaggaatctttacaaggtaacaggcacctatcgtcattttaatggtgtcgtatatgattcagtatatgatctcaatggtaaatggatcggttatatcgattctgcaaagcttagtgtggagaatcaaggtccagctattagcgacgaacgctatacaacagtcactagtgcaaattactcgatttggcaaaatttttcttggaaaatgcgtgcgtcaagtagttcttatttgcaccagacgctaaaaattaaatatcgttatgagcatttgaacggcagcgtttatttttcattatatgacaatcaagacaattgggtgggttatattaatgcaaatgccacgaaagttgccgacaatgcagcgggtgctgtgttattcagtggacaatacggaacggttactagtaaaaattattcaatatggcaaaatttttcttggaaagaaaaaaataaaagtgctaacgtttatggacagacattgcaagtgaaacgctattataatcattttaatggcagtacctattattctttatatgataatcgaggtacttggcaaggatatattaatagtggtggaatgaagatggcggataatgcagctgggagtgcacaaagctatcataagaaaataaagttcacacaaaattttcctttgtggcaaaactttaactggaaaaagaaaagtaccgttacagatgcaatgaaacaagagacgtatgaagcaagatatgtatatcgtcattttaacggaagcaattacttatcaatttatgacaacaaaggtatttggcaaggttatattaatgaatcggccactcgccaagtaaactaaaaaattcaggacttgcgtatagattacgcaggtcctgaattttttttggtctcaagaggaagtgtgatcgtaaatgttgagccagcccctgggaagctgtcaactgtgatagtgccgcctaacagtttcgtataatctttaacgatggctagtcctaagccggttcctcctgaattacgcgtacgagctttatctacgcgataaaaacgttcaaagatccgaacttgatcttctcgatctataccgatcccttggtcacgaactgaaagctgtaattgttttgctcgatacgaatagtcaacttggatggtcccttgtgatttggaataattgactgcattttcaatcaaattttttaagattggttgcagtagctctctttttgagatgaaaatcaactcttcgggaccattgatgataaaggacaactgtttttctcgtgcaattggttcataggagcggatgatttgctcaatcaatgctcgaaggttgatttcttgtgcggtgtaatcaaatgaatgactatctttggataaaagaataatctcttgaatcaaattttctagacgataggcatctttttggatgattttaaggaacgaaaccaatgtttctcgatcttctaaggcaccatccaataatgtttccgtaaaaccaatcaaagaagtgactggcgttttcaattcatgagaaacattaccgacgaaatctttttgcattttttctaattgacgcacccgagtcagatcataagagatccctaacaactcattttcattaaagagacgcaatgttacatcaagaactcgcggatgatcatcactcaaagcaatttcttcttgtaaagaaggggtctgctcgttcatgtgataaattaattgaatcaactgtgtatcatgaatcacttcagtgaatggttgtggcaattgaggcaatgcttcgatccctagctgctcttgcatggtagggttcagcaataacaatcggtcatcctgatcaatgataaaaaccccgatcatcagttcattcaacaggccatacaattgttgctcagaagcggcataagcttgataggttcgactcatttgttcactcaattgattgattgtctggtataagtcatcatgctcaggtgtttcttgcataatgatcgcctgttgatcaggagaagaaatcattttttttagaacaggcaaaatagtctgcacaggacgatttctttgacgtaacgcatgaaacgtcaaaaagctgacaaataaacaaaataggagataaacgaaaaagatcgaacgctgaatggtttggcttttagcaaaaaaaggtgccgttggttcagcgatccgcaaaatttgctgcaagttgccatcttctttgacagggatcgcaacatacagcaattcttcattcaatgtatcactttttcgcaaagactggcccagattactaccttttaagactgcttgcacttcaggccggttggctctgctttcttttaaagacgaatcgtaagtatcgtagatgatccgcccatccttgtccaataaagtgatccggctggaactatcctgtacataggcatcagcaaattgttgcaatgtcgctggttgattatcagaaaggttcaagaaaatcgccgctttttcttccaagaagtctacttgttgggcaatcacttgctggcgatagaagctgctaagaaattgccagcagatgataaacagtacggctaatagcagactccataggccatagccaaagcgtttcatgaatgaggctcctgaaatttataaccaaatccgcgaactgtcactaaatactcgggatgtttcgggtcacgttccagcttttcgcgtaaatgactgatatgcacatcaacgattcggctttggccatcaaagtcaaaattccaaatgcgattcagcagcgtatcgcggtcgatcacacggcctttccgtttcatgaagtatattagcagttcaaactcttttggagtcagaaaaatcttttctcccttgacgcttacttggtaattggtcaagtctgctaaaatgtcaccaatttgcaacatttctgctggctgatccgaaagatctgcagtgcctcgcggttccaaccgtctaaagattgctttcatccgagcaagcacttctctagggctaaagggcttggtcaaataatcatctgctccgatttcaagcccaagaatccgatcaatcggatcatctttagcggttaaaactaaaataggggtctcgattttttcttgtcgtagtttcttggtgatttcgataccgtccatttgcggcaacatcacatctaagataatgaagtcaaaatcttcagatagtgccagatcaacccccattttaccgtcgacagccgaaacgacttggtatccttctttttctaaattgaatgtaagtaaagtaacgatagatggttcatcatctaccacgagaatttttttcatcatgaactcctttcttaacaaaggaacaatcattttacgttgttctagctatattttagcatgaataaagaattggtactattgtctaccacaaataaatgctataataaaggacgatttgagaagaaagctgagggtgttcgatgattggaatcagtgcatgtttaggtggggtcatgtgccgctatgacgggcagcatcaagcggttgctcaactggttgaactcgttcaaactggtcaagcagtgatggtctgtccagaagtccttggcgggttgccaattcctcgtgagccagcagaaattgttggtggggacggtagagatgtttggtcacaaaaagccaaagtcattactgtcactggagaagatgtctcagaacaatttatgaacggcgcaaagcttgcctatcaaaaattacacgatcttgggatcacgcaactgatcttaaaagaaaaaagtccttcttgcggcagtcggattgtttacgacggcaatttttcaggagtcaaaaaagaaggtgttggtgtcgccagtgcttattttcaacaacaaggaatgaccgtgctgtcggatgtcgactggcttgctgagcaggaggaaaataatggagattgaaaaaaccaatcgaatgaacgcgttgtttgaattttattctacactgttaactgagaagcagatgaattatatggaattgtattatgcagatgacttctcattaggtgagattgcagaagaataccatgtaagtcggcaagcagtgtatgataatatcaaacgaacggaaaaaattcttgaagactatgaaaaaaaactacacatgttttcggattatatgatgcgggaagacttgttggagcaattatctgagtacaccaagacgcactatcccaaagatgaaacattgcgctcgttgatcgaagagatccaagaaatcgaagaataaaggaatgaaaaaagatggcatttgaaagtttaacagaacgcctacagcaggcgatgagcaaactgcgtaagaaagggaaagtttctgaagcagatgtaaaagaaatgatgcgggagattcgtttggctttattagaagccgacgttaatttacaagtagtcaaggaatttaccaaaaatgttcgtgaacgtgcagttggagcagaagtcttagacagcttatctcccgcgcaacaaatcgtcaagatcgttgatgaggaactgaccaaaacattaggttctgaaacagttggtattgagaaatcaccaaaaatcccgactgttattatgatggctggtctgcaaggggccggtaaaacgacatttgctgggaaattagccaaccatttgatcaagacagaaaatgcgcggcctttgatgatcgcaggggacgtgtaccgtccagcagcgatcgatcagctgaaagttttaggccaacaattagatgtaccagtttttgatatgggaaccgatgtcagtcctgttgagatcgttcgtcaagggatggcattggcaagagaaaagaaaaatgattatgtcctaatcgatactgccggtcgtttacacatcgatgaaacattgatggatgaattgaagcagatcaaagagttagcacagccgaatgaaatcctcttagtcgttgatgcgatgactggacaagatgccgtgaatgtcgccgacagcttcaatcaacaattaggtattactggggtcgttattacgaaactagacggggatactcgtgggggtgctgcgctttccattcgacaagtgactggtgcgccaatcaaatttaccggtactggggaaaaactgacagacttagaagtctttcaccctgatcggatgtccagccgtattttaggtatgggagacatgttgacgctgatcgaaaaagcccaacaagattacgacgagaaaaaagcagaagaattagcgcaaaaaatgaaagaaaattccttcgacttcaatgactttgttgagcagatcgaccaagtgatgggcatgggacctatcgaagatcttttgaagatgattccaggaatgagtcaaatgccaggtatcgaaaacgtcaaagtcgatccgaaacaaatcgcgcgtcaaaaagcgatggtctattcaatgacgcctgcagaacgggagaatcctgatttgctgaatccaagtcgtcgtcgtcggatcgcagcggggtctggaaatagcgtggtcgaagtcaatcggatgatcaaacaattcaaagaatcccgaaaaatgatgcaacaaatgaccaaagggaatatgaatatcccgggtatggatcaaatgtttggcggcggtgttaaaggaaaattaggtaaaatggccatgaaccgaatggtcaaaaaacaaaagaagaaaaagaaaaaacgtaaataattaactgaaataagcaagcagccgttatgctgatcaccatgaaaagtatcgaaaagattccaggatcatttctgatactagaagatggtttggtcgacaacggttgcttttttcgtttgcggtcttctgttcgtcagttgcttgtttggaaagggaatacctatcagttggatcgatagctgaaacgtaatatagcgacctttgaacatgtatcggctgagcaaggatagatggtttaactagctgatccaagtagattcattaagtacttgaacgcgttgcaaggcaaaatattcgtgctttagacggatagatgctactatttatttatagtaattgaaaggagcaagtgacgatgacaaacaaagatcgagttgaaggtaaaattactgaaacaaaagggaaagttacgggcgatgactccgaaaaattaaaagggaaaacccaaaacgaatacggtaaagtgaaagataaagtagaagactttgcagatgacgtttctcgcaaagtgaatcatttctttgataaacatgacgataaagataagcctaaccgctaatttaactgaaacaaccgttaacgatttcgttaacggttgtttttttcttttaaaaaggaagactgtcaaagaagtgctagctgacagtccggctattcataaagcgacgagcatgccaccattttttgattgctttcggataaaccaataggaagctgactacaagacagaccactaagtaaatacaaatcgaaacgatagttctcgtttgagagaagtcatcataatagagttggaccagcaaccaattcatattgatcaagtagaaccaagtaccaatggccatcactaaaaagacgggcaatcgaaaggcgggaaccgtcagatagtcgccgtcattttctaaggagatgcgggcaaacacttcttgagcagcagcaatcaacaacaaggataggagtagtgtggcgaagactgcccaccaattgactggtaagccattgggccagtcattccaaagattgttcaatactaagtgccccccttttccatagaagaaaaagctgagaaattcttgcagattatagtaaaaactgtaaaaaccgctcatcaagaaaaaaatcaaaacgatcgttaatggaccgaaaaagagattgcccaaaagcacccctaagaaggatccgatggctgtcactgccaaatttcctacaaacgtaccaacaccagatgcgaatagatctgatagcggaatttggaaatattcggagggaatcatcaagtagcgaatgcaaatattgctcaaaataccaatgattaaagcgaaactgaccggtgcaaataagaaaaccgctttttgacggaaaatctgtcgttttttaaacggcaatgagaataaaaaacgattgaaatttgtcttttgatcaatgaaaaaactaagaaaaccaaaaacaaacaataatggaagaataaaataagcgcctgaggtattgaaattagcaatatacgtatcctgtccattactttctggtaccggactattataaatgagcaagttttcatccttgtattcatcgatcgatgagtaatagactggtttttctccgttatagtccttaatatagtaatcaggatgctcttggaaatctttcttgaattcttctgaatcaaaatagttcttttgattgtgccaagaacgttgggtatcccagcccattcctgcataaatcaaaaccaagatcagacaaaagccaagcaacagtttgccatatcgctggcaataaatttgttttaacattttctttcacctctaacctttcaacagggattcttgactcaaattggcttcaaataaatcttccaaggtcaatgggagttcttcaaagagcaacggctctagttgccggatctgttcttctaatgccgcgtcgtattcttcgaacaaagcaacaatcacccgcccttgacgattgatcaatttcgaatgctgtttgatcattggcggtacctgtttcccacgaaagacgaattgaattttacgggcattttcccgcatcgtttctaaccgataatctttagcgattgttcttcctttgattaaaagggctcggtcgataatgttctcaagctcatttagattatgagaagcgatgatggctgtgcgattagattcactcaagttttctaacaaaaggccaatgacctttttgcgtacaataatatctaaaccgtcaaaaggttcgtccaatagcaagtaatcggcatttgaagcaatggctaagatcattttatacaatccttgcatgcctttagacattcggcgatacgaatggccaagcggcaatccattgctctgcatcagctcaagataaaggttttgattaaagtgggaataagcgagacgataaaaggcattgatttttttcaatgaatacgccgctaaaaagttctctttttcatcgatataaaataagttttcctttagttgtggcttctgggccaatgattgaccatcaatcatgatttcgccgccgtctaaagcgtactgtcctgagagtgtacggaaaagcgtggtttttccagagccgttgcgcccaatcaagccaacgatttcatttttgcgcaatgaaaatgtaacatcttctagaatagtagtcccttcaattttctttgtaacgccttctaggttcatttattgatccctcccagttcttcttcaaaaacagtgacccaagcagtgatttcttggatgctgatctgcaaatgtcctgcctcgatcactaattctttcaatcgttcttttaattgttggatgcgccgctcgtcgcgtggaacactgtccagtgctttgacaaacgttcctttgcctttgatggtgatcaagacctgctcattttctaatattttgtaggccttgctgacggtatttggattcatcaacaagcgtttggccatctcacgaaccgaaggaatttgatcacccggtctcaaaacaccatgcaagatgtcttctttgatgctcaatatcagctgctcgtaataaggtttgctgcttgtcttgttgatcatgaccatgtactcagcccctttcatttatgtgtactagtatacgtagtacactatcaaaagtaaagaacttttgctaaaataagacaaaaaggaggagtgactatgactcgttgtggttgggcaacaagtagtcccgcaatgcaagagtaccatgatcatgtctgggggaaaccggagtatgatgatcagcagttgtttcgtaagttggttttagatatgaatcaagcagggctgagttggcaaacgattttgaacaagatgtcaaattttgatcaagcatatgatcactttgatattgagacagtagccaattattcggaggaaaaaattctagcactgatggatgatcccggtattattcgtaatcgcagaaaaatagaagcggcagttcataatgcacaactcgtattagcgattcagcaagaaatcggaagtttttctgattttttatggcgttatgtcgaccatcgacccgtcatcaatcattttcaaacacaatcagaagtacccatccattcaccaatttctgatcgcttggcgaaagatttgaaagcccgtggctttaagtttgtaggaacgacgacaatctatgcattcatggaagctgtaggaatggttaacgatcacctgacaagctgtatctgttacgaggaacgttagaaagaagagaaaaatcgaggaggagtcttatatgggaaaactggttttttatggcgctatcagtttagatggctatttagctggagcaaaggatcaattggactggttgttggagaccgatacggggacaagtactacgtatgagaaattttttgaaacgattgatgcaacagcgatgggccgtaagacgtacgaagaagccaaaaaaatgttggcgacggagaagctctatccagaaaaagaaaattatgtgttttcccgtcagatgcagaccgatttaacggacgcagtagttgtggatcaagacccggttgcttttttatcacaattgaaaaaagagaaaacggtttggttggttggcggtggaaagttattgcaccctttattggaagcagatctgattgatgaatggtatgtacagatcgctcctgtgttattaggaacaggcaagcgcttgtttgagccaggagagtatactactcgtttacaattcgtggatatgacgcaaatgggtgaactcgtagagatccactatcaacggaaatagatggcttgctttctgagtttctctttttctgtgttgcagatacttccttatgattcactcagagtttacattgaaccatccagcaaaaaaacgcacactcactggtttcccttatgggatagatcagtgagtgtgcgtttcttatctgactgtcacaaaatcgtgaccggtttttagttgtaacggttaaacaagtcgatgtagttgtcaacgattgtttggaagaagttgacggtatcttctttgatcgtattgttttcatcgatcaagttcatgattccaccgatataagcttctggttgttgcaaagtcggcatatctaagaataccaatgattgacgcaggtgatggttcgcaccaaaaccagcgatcgcacctggtgaaacacttacgactaaagcaggtttcccgctccagctgcttgctccataaggacgtgaaccgacatccaaggcatttttcaatgctgctggtacagaacgattgtactctggtgtaaagaagaatacaccgtccacactttgcaattcattacggaatgttgtccattcagtaggcactttgccttctacttccaagtcttcattataaaatgggagattgccgatttctaaaaagacagcttcgaaaccttctggcaataattctgcaaatttcttcgctaccagcttgttataagagccttcgcgtaaactaccaacgataaaaccaattttttttgtcatgttgaattcctcctcatatcttttacatgttttatcttaccaaaagtaagtaaaactgacaaataaaaagcatttgcctagaaaatccattcataaagcgatgtctcagctataatgactgtctctctctaatgatacgcgttgcaggaaaatctggcaaaagataacctatagaagaaagaaacagaaaaaaagagactgtaaagaaaaaactctttacaccgtcagtaaaacctgttaaactagctcttgtgattaaaacaatggaggtgtaaataatggcagtaaaaattcgtttaaaacgcatgggttctaaaaagaaacctttttaccgtattgtcatagcagattcacgttctcctcgtgacggacgtttcatcgaaacagtaggtacttacaatcctttgcaagacccagctgaagtgacaatcaaagaagatttgattcttgattggttatcaaaaggtgcgcaaccttctgatacagtacgcaatattctttcaaaagaaggcgtaatgaaaaaacaccacgaagctaaattcactaagaaataaggtgacgacggatgaatgatttgcaagaattagtcttaacgatcgtttcaccattagtgaccaaacctgaggagatccagcttgatgtggttgaatcagaagatttctttgaatataatcttacagttgctccggaagatatcggacgaatcattggtaaacaaggtcgggtggctaaagcaatccggacgatcgtttacggggttcgcaccaacggccccaaaaaggtccgtttaaatatcattgatggaaagtaattgatcgcatcactcattgagtgatgctttttttctatcctgttagttcatgctcaagacctatgacagatcggctgatttttgagataataagaaaaaggaggcgggagtatgtcacaagtgattgcatggatcctatttatttttgttttgatctttatttataaagtggggtcatttatctggcgcatattaggcgtattgtttttgctatttttactatggatctatcgggatgtcatctttacacaagttagtcaatggacacgagatttccgctgggatccactaccaacttatttggaccaaggaattcaatgggtaaaagacggctggcaagccttgcaaagctggatttcgaataggattagctaggaacaggagacaagcaaagttgtttgtctttttattttggaaaaggtatgctctataaaaagggggaaatcatcatgaaaaaagaaataggtctcctagtgacagtattggccattggggcattagcaggatgcgacacgaaaaataatacggataagtctgagtcaacccattcaagcactcatactagtacaaccatttcttctgaaagcagtagcagtagtagtgaggcagcctccagcagtgccgcgcaaacttcaagtaagacagttacccaagcaggaacactggatcagttgtcagctgcttttccgcaggatcgcttgccatcagaggtgccggtgacggagcaaaagaccttgaatgctgcaaccgacgaaggggcagatcaactctctatcctctattatcagttaaatgatcaacgagaattgaatgatccatcattgaacaatgagacaccaatcgctagctacaaaaatgctgcttacgaaaatgaagaccaagcggcggaggctgtacatgcgaaccttgatgaaggcggacaggcggtcgatctaggacataacatcactggtcatatgcaaggtgcagctggttccagttatctaagttggcaagaaggcaattggaacttgacggttcgagcagtcaatcaagagaatcaagatcccgtgccagtagcaaaaaaaatcgtggcctatttagaagaagctatgctgcccgctccaggaattggtcaaatcaccattgatatgggaaaatcagattacacggctaacagcgtttcttggcaagacagtaagatcacttataccttgcaacatcaagatcctttatccgcattgaaaatggctgtctcaatgaatcaataaaagagccaatctaacgtgtaggaggaagtcatgcagattacgtatttatctgatcctcaagaaaagaaacagatcgcacaaaccattctggctgatttgccggaatggttcggcctgcctgaaagcactgccgattatattgaaaaaagtgcctatcaagaaatgatcgttgtagagaacaaaggttttttgacccttgtaaaaacaagtccagcgactgctgagatctatgttatgggcgtattgaaagccgatcaccatcaaggaatcggcagccaattgatccaagaagccatccgttggtgccaacgagaaagtatggcctttttacaggttaagacattggcagagacgcatccagaccaacactatcaacgtacacgaagtttttatgaggcgatgggttttttgcctgtcgaaacatttcccaccctttggggagcggaaaatccatgcttgttgatgatccaagcagttccacctcgggaaaacactagaattccttaactccccatgctaaaatgagaaggattataaaggaaatgaggaccaatcgtgactgaatttttaaatgtaggaaaaattgtcaatacccacggaatccggggagaagtacgagtgatctcgcaaaccgatttcccagaagaacgctaccgtaaagggcaacgattaacactgtttcgagaaaataaagcaccgctggaattaaccgtcgctggtcatcgtaaacacaagaattttgatttattgacattcgaggggtaccccacgatcaatgatgtggaacctttgcgagacggtatcttaaaagtttcaaaagacgaattaagcgaactaacagaaaatgagtattactatcatgaaatcatcggcttgaccgtcattgatgagcaagccagagaactaggaaaaatcaaagaaatcctatctcccggtgccaatgatgtttgggtagtccaacgcaaaggcaaaaaagatgcgttgattccctacatcgaatcagtggtaaagcaaattgatttggataaaggcgaagtgcatattgagatcccagaagggttgttggatgatgaggattgatgttttaaccttattcccaagaatgtttgacggcccaatgggggaatcgatcattggaaaagctcgggaaaaagagcttctagaaatcaatgtctcaaactttcgcgaattttcggacaacaaacaccaaacagtagatgactacccttatggcggaggggcagggatgctgctgaaagttcagccgatctatgataatttaaaagcgatcgaaactgccaccccgcaaaccaaaaaacgtattatcttgttagaccctgccggtaagaaattcgatcaaaaaatggccgaatctttttcgcaagaagagcatctggtatttatctgcggacattatgaagggtatgatgaacgaattcgttcgctagtgacggatgaagtttctctcggggattatgttttgactggtggcgaattaggcgcgatggtgatgatcgatgcgaccgttcgtttgctgcctgaagtgctaggaaacgagacgtctgcgcagactgattcccactccacagggttgcttgaacacccgcagtacacgcgaccagcagaatttcaagggatgacggtcccaccagtcttgatgaacggcaaccacaaactgatcgaagaatggcgcttaaaagaatccttgagacgaacttatcatcgacgacctgatatgttggcggattatcccctaacagcagaaatgaaaaaaatgctacaagagatcgacgaagaagcttcggcagaggatgaatcaaagtaagaaatctcagtatctagaatcgcacctgcaatcaaatgaaaccaccacaacggatactagaagcaccagtctagtccgttgtcttttttatagagacaaaataaatgtcgggaaaaaaagctggtgacaagaaatttgtctttacatgagctggaaagttatggtaagatatttcagtgagtgtaaactcaactattacgatattccgctggagcaaattgctttaagaatgtttgggaataaggagaatgataaagatgaatccattgattcaagaattaactcaagaacaattacgtactgacatcccagctttccgtcctggggacactgttcgcgttcatgcgaaagttgttgaaggaacgcgcgaacgtatccagttatttgaaggtgttgttatcaaacgccgcggagctggtattagcgaaacttataccgttcgtaaagtatcaaatggtgtaggtgttgaacgtaccttcccattgcacacaccacgtgttgcacaaatcgaagttgttcgttacggtaaagtacgtcgtgcaaaattgtactacttgcgtgcattacacggaaaagcagctcgtatcaaagaaattcgtcgttaatcatttattatcagatgaagcaaaagcccttgttttcaagggcttttttcttttggtcaggaggggtctatcatttgctttaatgcctcatgcgcaagtaaataaggctgatcatgtagctgcatattttttaacagtatcccgaaaattgtcttttgttctgactgaggattcgattgaatccgaagaaaagtttgattagaatctcgaaaaagtcatgaaagtcgataaaaattatgctatacctaaacaaagataaaaattgaaatgagggatgaggatgaaagtcacttatttgggtactgctgcggcagaacgtgttccagccatattttgtaattgtaggatctgccgtcatgcgatggagaaaaaaggccgggagattcggacccaaacgcaagcgttgttggatgatggcaagcttttgatcgattttcctggggacagttacctgcaccgattgagtggtcgagtggattataatcgcgtcgaagcattattgctgacccactggcactcagatcatttttacggagaagatttagcttatcgaatgtccggctatgccaatgggatcacgactcaattggctgtctatagcaatgcctatgtgaaaggtttttatgaccgagcgttccaattggaaggacgttacgatgaacaacgcctgacgtatcatcttttggaagcgtatcaaaaaacatggatcaatggctatgaagtgtattctttaccggcacaacatggtcattttgccgaagattgttttatctatgtcatcaaagatccaacaggcaaaacacttctctatggacacgatacaggctacttgacggaagagatgtttgcttttttagaagcaaataagtttatttttgattgtgtatcaatggattgcacggggcagaccaatgctgaccagatggccaatcatatgaattggtcgcaaaatattcaaatgaaacaggagctgatggatcgcaagttagcgactgaaaagacgatctttgtcgccaatcatttctctcacaatggagggagaacctatcaagagatggcagatctctcagcttcagaaatgatcattaccgcatatgacgggttggagatccatctttaatccgtctgacgattaattcatgaatactgaatgtcaacaactcataagggaggcaaacaataaaaatagatcatgaaaatagcgtgttaagtgggaaacgatgtccagcgagatttaggtgctagagaaatgagtaaataaagaggaatgatttttcatgagaaatcagaaatttgaatactatatgcgagaattaaacctgattaaaagacaaaactggattgaaaatgacctatatcatctagttgcggaaatgattaaggctggcaaaaatatgtctaggctatctttaagagatgtaagcttgcgaagtaggagtccaaaaggtcagatattctatggcttatcttcatttcctgattttgtcatcttggatgaacggtttgataattcagataatcttgccgggggaagtgtaaatatagcgaataaaaatttgatttatggctgcgttgaagtaaaaaatgtcgatgagaagctattagatctagaatcaatcgatctaatatcagaatttgagaaagcaaaaaaaccaggaaatgaactgaatcaagatttaggccaactcttaggacaaatactatggtttaaaaaagttttgtatacaaatggcaatatatggaaattctacaaacgaacaagtcaagaaacagataactttcttactgacaaatgtatagaaaagttatttgaggatcgtatgaaaaatgaggcccctgattacaaatggtatgtaggactagatgacgataatttaaagattgaaaaagtttttgagtttgtcttagagagtgatataaaaaaagaagtatgggaagaatttctaaatagcttatattcgattaactgggaaggataaagatgctattgtggaagaataatcatcttttagaaatgaatcaggttgttttacttgcggctcaatggattgcagggggcagaaacatgctgattcaatggccaatcatatcacaatagccgaatgaagcaagaatggatggatctcaagggattgactgaaaaagggatctctgttgccaattacttctcacaatgggtgaacttatcagcaaataacggatctctcagcttcagaaatgattattaccgcatatgacagggttggagagctatctttgagccacttggaaatcgtctagcacgtataacgctatcgtcagtttaataagcgagttgaggacctatatttgatctcctcgattcgctttttttgatagtctgagataaaccgcttgctgatgaaggagtgtagctaataaaaaaaagataccagttgaagtgcgaaaaagaaaaaaatagaagttgttcttgaatgaaaatagttggaaaatcatttttcattttcttttatgcctgttaaagtcaatgataccaatcatattaacaagaccaaaaatgaaaatacaaaaaaaactgttcttagtattgactcataaaaaataccactactatacttgtattgtggttataaccagttaggagagacatcgatgcaaaatacatttcaatcaaaatcactttattatcagctggtagaaatattgaaacaacgaatcgaaaacagtatggtcgctcatgataagctgccatcagaaagagagttgaccagtttttatggcgttagtcgcacgacggtgcgactagcattgcaagaactggaaaaaatgggctacatttatcgacaacatggaaaaggaacctttgtttcggaattaaggacaaatgcgactgatctagctggcgcatatagttttaccgaacaaatgcgggcaatgggcaaacatcctgaaaccaagatattggccttcaaaaagattgaagcaaccaagtatttagcggggcatatgaatgttcaattaggtgaacctttgtttcagttagaccgtttgcgcttagccgacgatctgccaatgatgatcgagaaatcctatttgccagtgaagctatttatgacactatctcgggaactgctatcgataaaaccgttatacgatttgttttctgaagatttcaatcaaacggtacgatcggctgacgaagaattttatgccagtattgcccagaaagaagatagtgagctgctaaatattccagaaggatcaccagtgctccatttagttcgctcaacctataatctcgagaacgaagtgattgaatttacattaagtgtggcacgggccgataagtttcattataagatcaggcatctgcgttccactaactgaattggaggaaagaaaatgtttatgttgtcaaaagaagaactgcaaaagctaggagcagaaaatactacccgagaaattcgacaacaaccggaactgtggcatgagacgtttgaccgttatcaagaaacagtcgcagatctagatcgtttgtttacgaatgcgaaacaacatgctggagagcgaccgatccgcgtcatttttacaggggccggaacctctcaatatgtgggggatacactaattccgtttcttactagtcaaggaaatacgaatcagttcatttttcaaagtattggttcgaccgatatcgttgctacgccaaaagaatacctgattcctgatgagacaacgatcttggtctcatttgcccgcagtggaaatagtccagaaagtctagccgcagttaagatggccaatcagctggtcaacaagatctatcatatcgtgatcacctgtgcaccagacggattattggctacacaaatgcctacaaaaaaagaaaatctagttttactaatgccaaacaaagccaatgacgctggttttgctatgacaagcagtttcagctgtatgacgctgactgcgctacttatttttgatcaagcaagcaatcagcaaaaagaaagatatgttcatcaattaagccgactaggagaagaagtcatccaacgagaatcagagatccaagggtatctggcatcagactttcatcgcatcatttacttaggttcgggaagcttaggcggattgactagagaagcgcaattgaaagttctcgagttgactgctggaaaaatcgcaaccgtttttgatacatctttaggattcagacatggtcccaaatcttttgtcaatgatcaaacattggttttcctgtttgtcagcaatgactcatatacgcagaaatacgatgtagatatgctggacgaaatcaaaaatgacggtattgcccaacgcgttgttggaattggtcaaaagggttcattgtttagtggtgattcctttgaattagctgcagattcgttactgccggatggctatcttgctttagcagatatcatggtagcccaaacgatcgcattactttgttcggtgaaggttggtaatacaccagatacaccatcgccaagtggaacagtcaatcgtgtggtcaaaggtgtaacgatttatccatatgaaaattaggaaagagtgtgaagcatgttagaatggtccgaaaataaaagacaagcaatggaacgtttatcgacgccggagggcattattaccgccctggcgattgatcagcgtggtgcactgaagaaaatgatgtcagctttagggatggaagcgacgaaagaaacgattgagcggtttaaaaccctgatttcacaagaattgacgccctatgcctcagccattttattggatccagaatatgggttgcctgctgcacaaaaacgtgcagcagagagcggtcttttgctagcatatgagaaaaccggttacgatcaaaccgttcctggtcgctttcctgatttgcttccggattgttcagttattcggtttaaagaatcaggtgctgatgcggtgaaatttttgctgtattacgattgcgatgaagaagaggaaatcaattttcacaagcaagtttttgttgaacgaattggaagcgaatgcatggctgaaggactgccattttatttagagttattgtcatatgatgctaaaaatgtagacacgaaatcgctttcctatgccaaagcaaagccgcgcaaagtgatcgaaatgatgaaagaattctcgaaaacccagtataaagtagatgtcttaaaggttgaagtaccagtaaacatgtcatttgttgaaggggatgcaacaggggagatcgcctatacacgtcaagaagctgccgcttattttaaagaacaaagcgacgcaacagatttgccatatatcttcttaagtgctggggtctcagcggcattattcatggaaacattgcgttttgccaaagatgctggggcacgattcaacggtgtactctgtggcagagcaacttggaaagatgcagtcgctccttttgttgaaaaaggagaagcggcaactttagaatggctgacagaacaagggacacaaaacattcgtcaattgaatgaagtgataagagaaactgccgtttcgtggcatgagaaagtagtacagccagtccaatagagcaattcaccttgcaaagctgactactaatgaatgggagcagaacatggctacgtttgaaataaaagaagagtttttaatgaatggttctccttttaaactactatctggtgcgattcattattttcgggtccatccggatgattgggagcactctctttataatttgaaagcgcttggatttaataccgtcgaaacctatgtgccttggaatttgcacgaaccgcataaagggttatttcagtttgaaggcattcttgatttagagcgttttttgtccttggcacaagagcttggtctgtatgtcatcctgcgaccttctccatatatatgcgccgaatgggaattcggcgggttacctgcttggctactaaaggagtctggacgattaagagcatgtgatccgagctatttagcgcatgtggcggaatactacgatgtattacttccaaaaatcattccctaccagttgagtcatggagggaacattctaatgatccaagtggaaaacgaatatgggtcatatggtgaagaaaaagcttatttgagagctatcaaagaaatgctgataaaccgtggcattgatatgcctttatttacttcggatggtccttggcaagccgccttacgagctggcagcttgattgaagatgatgtattggtcacagggaattttggttcccgggcaaaagaaaactttgcagcgatgcaggatttttttgatcagcacaacaaaaaatggcctttgatgtgtatggaattctgggatggctggttcaatcgctggaatgaaccaattattcggagagacccagatgatctcgctgaatcagtcaaagaagctttggaaatcggtagtgtcaatttatatatgtttcacgggggaactaattttggatttatgaatggttgttcggctagaggcgcagtcgatttaccgcaggtcacttcctatgactacgatgcaccattggatgagcaagggaatccgacagcaaagtattacgcattgcagaaaatgctaaaagaacattttccagaatatgaacagcacgaaccgcgcagcaaaacatctctatcaatggaacttcaactacaagataaagtaagtttgttttctgttatcgatcaaatcagtcagccggtcaagacggtttatccgcaaacgatggaacaattggaccatccttatggctatttgttgtaccgcacgaagaaacggcgagacgcggaaatagaaaagctccggatcattgatggaaatgatcgtgcccagattttcttgaatgaaacattccttgcaacgcaatatcaaggagaaattggtgaagacttattgattaagcaagcagcagaagaaaatcaattggatattctagtagaaaatatgggacgagtcaactatggacataagctgacagcagagacccagcgaaaagggattcgtagaggtgtgatggctgatctgcactttgtgaccaactggactcattactggctagacttcagtaagtcaccagcaattgattttacgcgggactggcatccagaacaacccgggttttatcgttattcctttgtgctagaggaaaaaagagatacttttattgatttgacaggattcggcaaaggagttgttctggtcaacaatgtcactgttggacgcttttgggaagtgggccccattttatcattgtacgtaccaagcggatttttgaatcatggggaaaacacaatcattatttttgaaacggagggctgctttgcaaaagaagtacatttgagaaaagaaccggtttataaaacgatggaggcgaaaaaagtatgagtattattggtgtacgtattgatggacgattgattcatggacaagtggcaaacttatggacgaccaagctgaatattagccgaattatggttgtggacgacgatgtagcagaaaatccaatcgaaaagagtggcttgaaattagcaacgcctgcaggggtcaagttaagtatcttgccgattgagaaagcagctgccaatattttggctggaagatatgattctcaacggttgttgattgttgctaaaaaacctgaccgtttgctcaaactagtggaattaggtgtgccgatcactgaaataaatgttggaaacatgtcccaaacagctgaaacaaagtctattaccaagtcaatcaatgttgttcccgcagatattgctgatttcaaagaacttgctagcaaaggtgtgaaactttttgcacaaatggtccctagcgataaagctgaaaactttatgagccttttagaaagataggagaatcaatatggaaattcattggtggcaaattttattattatcattatatgcaggttatcagattctagatgaattacagatctattcttcaatgagtgcgcccgtttttgctggtcttttttcagggttagtgatgggagatatcacaaccggtttattgattggtggtagtatgcaactgacagtccttggtgtaggaacttttggcggtgcttcgcggatcgacgccaattcgggaacggttttggccacggcattctctgttgcattaggaatggatccagaacaggcaattgctgcaattgctgtaccggtagctagtttgatgattcaattagatattttagctcgttttgcgaatacgtattttgctcatagaatcgatacccacgtggaaaatatgaatttcaaagccatcgaacgaaactttttgttgggcgcagcaccgtgggcgctatcacgacttgttcctgtatttctcgcgttggctttcggtggcggattagtcgaaaacgttgttagttatttgaatggtgatttaaagtggttaggcgatggattatccgttgccggagcagtcttaccagctgtaggttttgcaattttacttcgttatttaccagtaaaaaaacattttccttatcttattttaggctttgttttgacagcattattaacaacggtatttagcaatatccaactattgggcagcagtgtagcaagtgttgtaaaagatttcagcggtaccttcaacgcattaccaatgttggcaatcgcactaattggtttcgcatttgccgctatcagctacaaaaatggacaagcacgtccagcaactaataccgcacaaaacgagcagcattcggaaggagagattgaagacgatgaaatctaatgttaaattaacgaaaaaagacttccaacaaatcaatcggcgcagcctatttggtttccaactaggatggaactatgaacggatgcaaggctcaggttacttgtacaccattttgccgcaactacgtaaaatctatggggacaacacccctgaattaaaagaaatgatgaaaacgcatacacagttttttaatacatcaaatttcttcaataccattatcacggggattgatctagcgatcgaagaaaaagagggatttcaggcaaaagataccatttcagggttgaaagccgggttgatgggacctttcgcagcaatcggtgattcgattttcgcagccctagtgccaacgatttttggtgcattggctgcgaatatggccatcaatggaaatccgatcggcatctttatctggatcgctgcacaaatcgtagtcatgatctttcgttggaaacaactggaatttgcttataaagaaggtatttcccttgtgacaaccatgcaaagccgcttaacagcattaacagatgcagcgacattactgggtgtttttatggtaggagcattagtggcaacaatggtcaatgtaaaatttgcttgggcaccaagtattggtgaggtcacattgaatatgcaaaacaatattgatatgattttgccgcggctcttaccagcagctattgtcgggattgtctattggatgttaggaaagaaaaacatgacatcaaccaaagcaattttcgtcgtattgatcgtcagtgtggcactgtcggcgttaggagttatttcgaagtagatggaaagtaggtaggaagttgatggaaaagcaattagtcttgattagtcatggccggttttgtgaagaattgaaaaaaagtacagaaatgatcatggggcctcagtcagagatccagacagtcccattattaccagaagaaggtgccgatgattttcgccaaaaactagcagctgtcatcgctgacagtcaaaaccctgtggtctttgctgatctgctaggaggaaccccatgcaatgcggcttctcggttaatcatggaaggtgcgacatttgagctgtatgcaggaatgaatatgccgatggtgattggcttcctcaaccgtacattgacaggagatccattggattatgaacaatttggtaaagagaatatccaacatgtcaacacgcttctcactgcagtagcagattttgaagaagattaagcagaggcaaagacattagtagttgatcagcaaagaaaaaccggcattagctgtacttcttagctatcacctatttgccttaaccaaacgacaaaaagcgctaaaaagccccaactctttgaacaattccctaaaaaaaggtatgatagctaaaagtatatttttgaagggacatcaaagggatgaagtactcaacgaaatacagcgatgccattcatattctggcctatattgaaatgttgaagggaaccgatctatccagtgatcgaattgctcaaagtgtcgagaccaatccagcctatgtccgccgaatcatgagtgatttgcgaacagctggcttgattgaaagccaacggggaaaagctgaacctaaattactaaaaaaacccgaagagatcactttgctagacatttattcaagtgttgaaaaggaccaacgattgttgcatattgacaaaaaaaccaatcctaattgtttgattggcggtagcattcaggaagttctagatgagacctatgagcgtctgcaaaaaaaaattgagttagagatgcaacagatcacactagcagatatcatagataaactcaatgtggctgctgaaaaatgaagagagacagctccgtttcaaaagcaaatgcttgacgaaaaggagctttctttttataatcaacatgtaatcttaaaagttacatgtatttttctacatgtacaagtttaaagatgaaaggaagagagcaatgaaaattggaattattggtgcaacaggaaatgctggttcagcgatttatcgggaagcaagcgcacgaggacatgaagtcgtagctatcgtacgcaatgaagaaaaagcaaaggaaatgtttgggaattctgtcaaaacaataaccaaagacgcgtttgaattgaaaagaggcgagttggaaggttttgatgctatcattgatgcgtttgctactagccctgatcaagcctatctacatgtcgacttagcagcccgtttgatccatcttttccgtggaaagaaaactagattgttcttcattttaggggcgggtagtttactgaatgatgctggcgacttgaatgttaatgacttgaaaaaagcacctgatagtgaaagctggatcgcgactccagaaaatcaattagacgagtacaatttcttattaactgttaaaaatgttgattgggtaggaatttctccagggaaccttttccaagctggggaagctaaaccggctattttaggaaaagatcacttgcttcaaaatgatgccggacaatctgtcacatctagcggaacattggcaaaagctattttggatgagttagaagtccctcaatatcaacaaacaagatttacagttattgatgcctgatttttttgacgatcgggatggtcttgaggagcaaaggagcggaaagaacagtaatgttttcataatgtttcttccaagaaaacaggaaagaaaccattttagaagaaagagttttcgaaattcaagaattctaccaagacaaaactctgcgagttgcttataatcaatagcagaggtgatggatatggagaaaaaagaagcatacgagctgatgctccttcagttaaaaggattgttagaagcggagagtaactggttagcgaatctggctaattcttccgcattgctgaatgaaacgttaccagatacggtctttgccggctattatctgtttcaagaaggcgaattgattctaggtcctttccaaggccgcgtgtcttgtacccgcattcagttaggaaaaggggtctgcggggagtccgctgctgagaaaaagactatgatcgtcgataatgtcaaagaacatgagaactacatatcttgtgactcggcagcaatgtcagaaatcgttgtgccaatgctggacaatgaccaactgatcggagtattagatatcgatagttcgaaaacaagtagttatgacgagatcgatcaacttttcttagaaaaatttgccgcttcgctagtagctgcacggcgtaattgataaaacgagcagcgaatcgtgttcgctggtacaaaagaaatacccaaatgatagaaagcgcaactttagttcttgaagttgctgaattgccggcttgtttctgaggcaacttctattcgtttggtttttttgtctgtactggttttttgtgcgaatcaatgcgtattacttttaattattaaaaaaacatgatattattataaaataattagaaaaattaaatttgaagatggaaattatgaattgtgataacattgttttaggaaaagcgtatgaatgtaaaccggtaggtatgcaaaggaggatcatcggtgaggtaatccgcaaaatggaaaattgtgtggtgatgagtgtcgtaagatatgatggcattgatcatgacgaaatcgaggaacgatgtggaagagtcgttgctcggtataatgaaatctatgaaccagctttagtcgaatgtttttttagttaaaaaaagacagaagcttattgtttaaaaacaggaaaataatgagctcagcaattaaaaataacaatttaatcaataatatttacgatgttagccaaattttttcagcaaagagtatcctttgctgtctgggacagtaactttcaagggcagaatacttgcctaatagttacggatcctattttctgctatcatcgttttttgtatgctgcgatagactgccaggcggccaataaatttcaataaagacttaatgatggtacaataaattaaaatcgtacgcctggaggagaatgttatgagagctgaattagtgatcttagaagaagaggagttactgtttaagcttcccaatgaacaaggtttattacaaattgcagatcatgatcgtgtgacacagcttgataatactgtgttttttcttgttaagaatcatgcggtaacagctattacaacagatacattgctggacttgactcagccccatgatcgaatcattagtattactcctagctgggaaatccaggcaccttaccttgcacattattatcaggagaagtatggtttgttgaagaaaaaaagtgaagcgatcccaggtgagcaaagtgagctcattgcatcttgcgcaaaaaattttgacttattgttagataaacttggctattaccaaaataccacttcccttgatccagtgaaaaaaacaaaagcaaggcatcaatggaaaaaagaattgcaggatcgacctttctatattgactatcaaggaagtcaggcaactgtttattggcaaaagcgcaatgaaatgcgaatcgaaaaaggggcaaaattagccgaagaaattccatataataaagacggttccttgggattttctgctcgcttaggagaaaaaatccgccaagatcatcaagcagcgattaaggatcattgcacgatagaagaagttattttaaaaagtgtcaatgaggttggtctgtttctttactacggagggaccaatggttggttgcagttaaaagacccatccgggcagacactccacgaactaaccgtggtgggctgacacgacaaatacgcgatacgcagtcgaaggacaacgcttgtcagatgaaatggattctcatcggcaagcgctgcccttcttttttagctgaactttcttgaaataagtttcaactcagttcttgctggaagatacaattgagtcgtcgaataaggaataatcttgtccactcttgtttattactacggaaggttttccgtttccttctttttctgcacgataagcttcacggtgtttttgcaagtgttcgggccgctttagccaggcttggaaatgtttcttttcttgccattttgagacgagttgaaaatcgactgatgcttttttttcgttgatccaacattcagattggagacagccttcaaacgttttcatcgaggcgatatctttgcggatcttttctgaaaatgtttcttttgcttctgctaaaacttcaaatgtcacagttttgatatacatgaccaacactcctttttgtggtaaatgcacgatttgactttgcatcatcattttccaattagtataactgtaattgagaatgattgtcaattaggtcggtatttttcttagaaaatacttgcttagtgaaaaaagatgtttctttcctacctaagaacagctaggaaagatctctccataggacctttctctaggtatcttagaagattctttcaagtaagggaatttgacagaaagattcgaatcacggtaaacttcacttaacaaaacggaatttttagaattatctgaaaaataggaggcgtcaagaatgacaaccaaagcaagagttatcggatcactcatcgtttgtagtttttttctagcagcctgtcaacagccgtcatcgaaaaccacagattcaaccaagtcagcaaatgccaatcagccaatgctgaatgttcagttttctgctgaaatggggagcgccgatttgtcgttagcaaccgattcttacagttttattaccttgaacaatgcctatgaaggactttatcgactcgatgaaaacaatgaacccgtgattgccggtgcgagtgaagacgcaatgatcagtgaagatgggatggtgtacacgatcaaattaagagaagatgccaaatggtccaatggggaacctgtcacagcagaggattatgtctttagctggcaacgaacggttgatcctgctaccgcctccaactatgcctacatgctagcaccagtcaaaaatgctgcagctatttccgatggaacgaaggataaaagtgaactagggatcgaagccgtcacgagtcatgaattgaagattacattggaaaaagcaacgccttattttaaatctttactcgcttttcctacttttttcccgcagagtgaagcggttgttcaagaacatggggatcaatatgccttaacaagtgcgaatgcagtctacaatggtcctttcacattggaggattatgacggcccaggtacagatattcaatggacactcaagaaaaatcctgagtattgggatgcagagtcagtgaagttatccggagttcagtttgatgtcgtcaaagaatcttcaactagctataatttgtatgaaagcgggcaagcagatgacatcacattgagtggggaactggcgatgcaaaatgtaaatcacaaggattatgttgttcaaccgagcgcgacgacccagtatttagaaatgaatcaagcagcggaggactcaccgtttcggaatgaaaagttgcggcaagcaatttcctatagccttaatcgtcagcaaatcgttgatcagattttaggtaatgggtcacttccagctgttggatttgttccttctgatctagcctttaatcctgaaacgaaaacagattttgttaaagatgcagggacttcgctgccttatgatgaagaacaagccaagaaattgtgggagcaagcaaaatccgaactaggaaaagataccctcacctttgaattactcacctcagataccgatcaatcaaagaaattagccgaatacattcaaggaacgcttcaacaaacccttgaaggattgactgtagaagtgaccaatgttcctttttctgtgcgattagatcgttccaatagcggagatttcgaaatggtcatgaacaattggatcggtgattatgcagatccgatcaatttcttggaacttttcaaaaaagatagttcatacaatcgcggaaaatggttggatgatacctatgataacttgatttcagaagcatccgatgcatatgccaacgatcctcaagcacgttggcaaaatatggtggaagctgagcagattttgaatgaaaaattgggcgtgattccattatttcaaagcgcagaggctcatttacgttccccaaaaatcaaaggcttagtggtccatagtgtcggtgcagcctatgactacaagaatgtttccctagagtaaagaaacaagcagtaagttagaagagatggatctttcatctttccccagattgcacaagcaaaaatgatcaataaatcagcaaaggagaacctagtgaaaaaagcagtccaagcagctatgacttttttatggaaacagccgcagcaaaatgcagttttaacaaaaatcaatgcgcaacctttagaagcagtccattcgtttttatcagcagcagatgcaatgactctctatgaagaggacttggttgattcagagattctttatgggaccgttgtcgaagtcgttcaagaaaaagaagaatgggcagaaatcattgtcttagaccaagcaagtaataaaaatccccgaggctacccagggtatgttcctagcaacgtattgactgtcatagacgagaaatatggattggggaaaaatcagaaggtagcggtaatcaaaccaactgctgtcctgcaattcaaagatcatcaaagaatcctttctttcggaacactgctggattggctttttgaggacgctgagtggtatcatgtgatgacacctgaaggaccagctgaaatttctaaaacacaagcccaacgaatcgatcaaggaaactcaacaactccccgacaattgatcgagatggcagaacaatttctggatttgccttatgtatgggcagggatcagcagcagtggctttgactgctcagggtttatgtatagtttgcatcgggtcaatggtattttgattcctcgggataccattgaacaagcgcaagtgggtgtgcagcgatcctatgaacaggcgcagccaggtgatctattgttgttcgcatatgaagagggaaaaggaaaagtccatcacgtcggcctttatttaggtgcagacgagatgatccactcacagacgccaggctccaaagtcatgaaaacaaagatcactggttctgcttatgagccggaattggcagttgtcactcggtatattgactagaaacagccgcaataagaaagaatcaggtagaaatcgcaagtgatagaaacaaaaaaatagcagtaaccgaggaaagcccaccatttttgcagaatacagcaagaaatggcgggctttttgaccgatcaaaagagagatcagttattagcgacaataaagtcacccatatcgtatcgatgccgggattgtgaaaattcaaaaggtatcccattttctaagtaaaccgtttgctcgacttctaaaatggggtcattgggggaacaaatcaaatgctgctggtcatagatatctggacggtcggctttgatccttcgaatcgatgtgccaatcggtaagtgcaatgtattggaaatatattcataaacggaagctttgagaacctcttcggtgattccgggaatcactgcgactggcataatggtatattccagcgcgaccgggacgtcatccaataatcgcaaacgaacaatatcatagattcgatcttctttaccaagtctcaattttgattgttcttgctcatcagccaaaagcgtatcaaaggaaatgattctgcttgtgagtttaccagtctttcctaagcgcttggttaatccgcggttcactcgggcgttataatcgaaggtagaataggcttcactgacaaaagtgccagtgccttttttggcatagatgattccctctacttgcaacaaattcaacgccttttgaatggttactcggctagttttatacgtaatggctaattcagtttgtttaggcagcttctgattcttctcatactttccatgactgatttgtgtacgaatatctgctgcaatatcatgatagtaagccaaatcatttcctccttttttgaagcataatcgattttgctgagtatgtaaacctcgacgtttacatactcagctttttgcttctttcgacgatttacagaatgaaaaaaatccagtaaattgagattgtaatcggttgcatttggtttgtttattttggttaatcaaagaggagttaggaggagtaaaaatggaagggtttatggatcgattggcaaatggcttaggtaaagttgctacgagaatcaatagttggcggtacatcatggtaattaagaacgcttttgccgctttgataccagtcattatcacaggtgcctttgggaccttattttcagcaatggtttttgattcggagaacggcttagcaaaaattgatgcgctcagctttttagaaaatctaaagccgatctcttcggcagtcagttatgtaacacttagttttctaacgatttatgctgtttttttaattgggatcgaactggcaaaactgaacaaaatcgatggtgttttccctgggatcattgcagtgatgtcttacttatcggtcaatccgatgatttttgaattcttacatgaagatgctactgttattgccgagaatgttttagcgaaacaatatacagatacgaaaggtttattcttgggcatgttcgtggcaatcctatcaattgaactttatgcctggctttgccgccaaaaaagattgcaaatcaagatgccggaaagtgttcctgccaatgtctcagcaagtttctcggcgcttttccctacaatattaacagtaacgatcatcgcgacagttggctttgctatcaaagccatcacaggaatgtatgcttacgatatcatttataatattgtgcaaaaaccattagaagggatagtacaaggtctgcctggtatcttgttgttgatgtttattgcacaagttttctgggtcattggtatccacggcaatcagatggtcaaaccaattcgtgaaccattactgctagcggctatcgccgtgaatacagaagcctttgaggcaggaaaagaagtgcctaacatcattacgatgccattctgggatatgtatatgagtatgggaggatcaggtgtcaccattggcttgctgattgctatcttgattgcaggcaagcgtgaagatatgcgtcaaatcacgaagctgtccttagcaccaggcattttcaatatcaatgaacctgttattttcggtatgccgatcatgctgaacccgatcttggcgattccatttattctgaccccgattattaccggcacggtgggttatattgctacatccatcggttttgcagcaaaagcggttgtgatggtaccgtggccaatgccgccaatcgtcaatgcctacttagctacagcaggagacatcggtgcagtggtcacacaaatcatctgtattttattatcgatcattatttatttgccattcgttatcgtaatgaatcgttcaacgaacgaagtggcataaaaaggagaggcttatgttaattgaaataccagaaacatttatcttaggggccgcttcttctgcttggcagacagaaggctggcaaggaaaaaaagcgggtcaggattctttcttggatcaatggtatcaacaagagcgttttgtctggcatgaaggctatggaccggccgttgcaacgaacttcatggaacagtatggtgaagacattgagctgatgaaagagattcatctgacacattatcgcacatccatcaattgggcacgcttttttaccgactatgagaagttgatcgtcgatgaagaatatgcagcccatatcgatgcggtgatcaatgcattgattgctgcaggagtagaacccatgttgtgtctggaacactatgaattgcctgcctacttattagacacgtatgatggctggagttctcggtatgttgtcgaattgtatagcaagtatgcagcaattgcctttgaacgttatggtgatcgggtcaagcactggttcactttcaatgaacctatcgtgatccagacccgttgctatcttgatgcgattcgctggccccatgaacaaaatacgaagaaatggatgcaatggaattatcataaaacattagcttctgcattagcgataaaaacgtatcatgaaaaaggctatcaaggcagaatcggctgcgtattgaatcctgaaatggtgtatgctcgttcttcttcgaaagaagatcagcaagcgaaaaaaatgtacgatcttttcttcaaccgagtcttttttgatccgatgattaaaggcatttatcccgaagaactgattgcattatgtaaagagcatgatatttattttgatcctgcaaaagaagacttagaagtgatccaacaacatacggttgattttttaggaatcaatcaatactatccaaagcgtgtgcgggcaccttattatcagtggaatgctgaaacaccgtttcatccggagcgattctatgagaactttgatcttcccggcaaacaaatgaatcgttctagagggtgggaaatctatccgaaagtcatgtatgacatggcaaactacctcaaagaaaattacggcaacattccttggctgatcacagaaaatggcatgggtcgggagaatgaagaggcgttcatggatgagaatggtcaggtagtagatgactatcggatccaattcatttcccaacatctttattggcttttgaaagcagtggaagaaggggcgaattgcgaggggtatatgctctgggcttttaccgactgtatctcaccgatgaatgcctttaaaaaccgttatgggctggtgcggatcgaaagaaatgctgcccgtacccgttctttgaaaaaatcagcctattggtatcgagaattaattgatgaacgtcgcttgtcctatgaggaattaccgcttattctttaaactaagtacattaagattagagaagctgtgacaaatcttttgtcacagctccttgtgtatattgcttaaaaatccaattgatgaggggctaatttgtcccagtcaaaggtcacaccaattcccggttcttctggcgcgatagccattccatcctctggatcaatcatcagagggcgagtggtgtattgatcgatcgggaaactatgcatctctaggtatccggcattaggcatggcagccagcagactgacatgaagctcttgcatgccgtgagtcgagatactgacattatgcaactgtgtcaatgccgcaattttcagccagccagtgatccctccacaattcgaggcatccggttgaggaaaatcgacttgaccataagataacatatgagcaaattcaattggtgttcgtaaattttctccgccagcaactgctatttgaccttctttagcgattcgagcatatccttcgtagtcttcgggaatcgttggctcttccaaaaagagaatatcaaaaggcgccatcaatttagcggctttgacggcttgttcaacggaccagctcatattggcatccaccataaaggtaatatcgggaccgatcaatttacgaacggctttgatgcgggcgatatcttccgccaatgttgcttgccctaacttgattttgacagcccgtaatcccatatccaaatatttttgattgttggctaataatttttctaatggaaaattcaagtcaatggcaccgccatagcagtttactttattgctgtgtcctcccaaaagtttatataatggttctcgtgctttttttgcgcgcagatcccaaagggcaatatcacaggcggcaatggcaaagcttgctagaccacctcgggcaatgtaatggatgccccaattcatctgttcccaaagagcttccacacaagcaggatcttttcctagcaggatatgtttcagttctttgtcgatcaatttagcgatcgactctcctccgaaaccacccgtatacgtataaccgataccttctctaccatcatccgtgcgcactttgacgattggcacctcaaagtgagtgtgtaatccgtgtttggcatcttccattaattctggtaagggaatccgatagtaggaagtttggatttctgtgatcgtggacataaaattcctccttttccaataatgttaacgtgtgcattattatcttaacatccacttggcaagaattcaagcggtttcatttgtagtttgagttgtcaatctctttctatcattgtaataatcctgtttttccagcgacctttaaccaagtgattccgatctgaaaaggagtcaaatttcttggtgggaacacgctgaaatagttgaacttctgcgcaacccaagctatgatgaacaaaaaggagatcacacatatgtgtacaagtttcacgctgactgctcatggacagactttttttgctcggacgatggactttgcatttttgttagacggcgaaccaatcgtcatgccacaggggtatcaatggtctttacaactagggggacaggtcaccaatacctatggctttgttggaacgggcaaacagttagaagaatttctttttattgatggggtcaatgagaagggactaacgattgctgaactctacttttcgaatgaagctgtttattgcgaatacacagcggagaaaataaaccttgcaccccatgaattgttacattgggtattaggaaacgtagcagacatccctgatttgtaccaaaaaatcagcaggatcaatctagtacagatagaaacggcgctactaggtatcacagtcccattgcattttattgtaacggatactaccggaagatgtgttgtcattgaaaccaatcgtggttttatcgaaataaaagaaaatccaatcggcgtgatgactaacagtccagaattggagtggcatgtaaaaaatattggcaactatttagctgcgagacctgctaattttcctcccgcaacagtcaatggagtagaggtgctcccctttggtcttggaaatggaacatctattttaccgggcggattgacttcccctgaacgatttgttcgaaccgtttatcacaaacagtttgtgaatgtaggagagactgccgaagaaacagtcaatgccatgttccatctcttaaataatgccacgatccccaaaggactgatggtcgaagataatggtcaatctgagtatactcagtatcgagtggtctataatgtgacaaatggtacttactatttcaatccttatgaaacccaagaagttttttcattgcaattgaagaaagagtggttacaattgaaacagccccggatttttgcggtttccaagagtttcacaacaaaaacgatggtgtaataatcggccacacaacggtcgatgcaaagatagataagtagaaaataactcagtttaacgaagagtcatctctccaattaaaagatccgcggtgtgtcattaccgcagatctttttttcgtgtgatttgccgtcgaaatttttgtagtaggtagctggggagtttatctattctgatgctgaaaaaaacggttcaaaggaaaagcgtattcttatgataatcgttcattgaaactacgagaagaaaacaagaaataatttttttactttcagatattaaaaaaaatctttgaaatacaataagtccagtaatttttttttatttgaaaatagtaaggcatcattgataacaacactgggaacgtttgtttcagaaatcggctgattcgtgatgatcaaatcaaaggattccaagtcatagttacctaattgctcaccattgatgggcaggatatctgaacgaattttatgcagatcaagaatatcttgaacatagtaactgatgtattgactgtgattgatccccatatcgctgatcactaagatcttttttgacaccaaagtctgattgatctccggaaaagaagtcaataaccagaatacataagaagacaaataactgatgagattcgtttccaacaattcagaaaaaaaatgcagttctgctttgagtcgtgcatacaattggcgctgtgtaaatttgatatgtcttgtaaaaaaagtggcacgctgtgtcagctctgtcgtatcaaagggcagtaattgcgcataggaataaagacaagtcagcaagtgtacaacgaagtcgtcgacctcgtctgtgatttgttccaactgcagaaaagtattgaaggtcaaattgtcacgtatcttctcactgatcacagatctattctctgaataaaattgctggaaagcccctttttgaaagtagtcaatgactgtttggcaagactctaaactaataccactcaaatggcgtttaatcaatgaatagtcttcattactgatttttgctttcacggctatcttggtgatagggcgttgccgaaatccttgactctctcttaacaaatcaacgataaaatacataatgaaaaagtcatgttcatagctgttgtccaagctgatactattcaaaatgcagtgattgcgccgcatcacttgttttagttcttgtttatcaaagtgataaggcaaatcacaatggccataatacatcaaaaaaaagtaggtcgtaaatatccgcagagacagctcatcgtcctgactcgttaactgatacccgcgatccacaatgacccgaagtgaataggcagccaacactttattgcaatgttttagttttcgtgcaaaagatgatcgactgatattgattgcctcacaataataatcgatcgttttgcctggctgttgaataaattcatgaaggagttgtgtcgttgttgaagttctcgccatatctgtgagtgtttgaagatacaatgtagcattgaaattctctagacgataccctaatttatgcgatgttttgatggttaaaacatttccccagcgttgcttgatctcttcaatatatcggataaacgttgattcgctgctaccaatgtgtcttgcaagttcttttttagtcatccacttatcagaaatggataacacacgaatgatttcttccatcttccgataatttttctccaaaaacctaatcatttcatttcctcccaagtcctttactttaataaaacaatcaacgaaacaataacgcaatctcaataatgaaaccgcttggtatgaaagctggtgtgatttgattcttcccttctatgtatacttaggtatctgattagaataacaaatttccagcatgcaggctattgggatttgctattggttcacaaatgaaaggggagaatgaaaattaatttactgaggaagttgtgggttttaggagcagtatttatgctggttagctcctatttcacatccataatcgttagagcagaaactattaatggggcagctattctatctgccaaaatcatatcagatgattctgagcagccacagctattactagatgtcgcactcacgaatcaaacaaatgagcccataaaaaaagaaataagaatggatcatgccaagctaaaagaagtagaagaaaaacaagagggatacggttatcaaattaaacacaataccctctatctgacaatagagcctcaactaaatcagaccattcaactgacgctgcccgttgagaaaaattcttttttgaccgagcaagcaccagaattaatttacgaaggtcagatccaaaaggtctctgttgtcatgccgcaggcaacaaaggaaaaaccgactgacacccaggacaatacttctagagcagaaacggatgctgtaaaggaaacagctgctacagatacacattcagcagaatccgaagagtcaaaatcaataaatccatcaaataccaacgaaacgctggcagaaaacagagaaacagaaggacctgaagcatctgaagtatctgaaagatcaacagctgcagatgaagtgataaaacctttttcactccctagcgttgcttctgatccagtgttcgatcgcagtcataaagcaatcctgcctcagtatacgacagatgcgtcaggaacctatccgacagcaagctggcaaccgactgggaatcagaatgtgcgcaaccatcaaggaaacaaagacggagctgcacaatgggatgggcaaacggaatggaacggggaaccaacgaacaaaaccaattcctatattgaatatggtgggactggttcccaagcagactatgccattcgcaagtatgccaaagagaccacgacacctggattatttgatgtatacctgaatattcgcggaaatgtccaaaaggagatcgcaccgttagatttggttttagtagttgactggtcaggtagtatgaatgacaacaatcgaattggcgaggtccaaaaaggggtggatcgatttgtagatacgctagcagaaagtggaatcacagacaacattcatatgggctatgttgggtattcaagtgatggatacaagaatgattcggtcgcgatgggcccctttgattcggtcaaaaatgccattaagacgattactccaagcagtactactgggggaaccttcacgcaaaaagctctgcgagatgccggaaacatgttggcaacaccaaatggacacaaaaaagtgattgttctactgacagatggtgttcccactttttcctaccaagtcagcaaagttcaaacagaaacgaatggcagctattacggcacccaatttaccaatagacaagaccagccgggcagtacttctcgtatttctaacagctactatgctccagaccaaagaaataccaataaattgatcaacagtacgtttatcgcaaccattggtgaagcaatggcattaaagcagcgaggaattgaaattcatggattaggcattcaactgcaaagtgatactaatgcgggattatccaaacaagaagtagaaaacaagatgcggcaaatggtgtctgcggatgagaatggtgatctttactatgaatcagccgatcatgcaccggatatttctgattatctcgcgagaaaagcggttcagatatctggaactgtggcaaacggcaaagtaaccgatccgattgctgaaccgtttagttacgaaccaaatacattagcagtcaaaagtgtcgggtcccttcaagtacaagccatgcccacactctcatttgaaggaaacaccgttcatagtgatgaaatttatttagggaaagatcaagaaattcagatccattatcaagtcaggatccagacagaatcagcaacgttcaaacctgatttctggtacccgatgaatggcagaacaaccttccaacgagtagcaacagcagatgaagtggtagattttggcgtgccatcggggaaagcaccaggagtcaagcttgatttcaaaaaaatctgggaagaatatgatcatgatccgagcagccgcccagaaaatgttatctatgaagtgaccagaaaacaagtttcagatacgacaaattggcaaacaggctacatcaagatttcgcaaccgtcaaatgataccggaagcttatgggaacgcactagtgtaacacagctttcaaagtcagcagatgatgcctatgccgaaaccttaggtctacccaaatacaataatcggggacaagatttcagctatcaaacgactcgagagctaactgtccccggttatgagcaagaaaaagtagatgaaacaacgtggaaaaacacgaaacagtttcagccattagcacttaaagtgatcaaaaactcttctgctggcgaaaaaaatctggtaggtgctgtgtttgaattaactggcaaaaatggccgtacgacattgatcgataatcaagatggcagctactccttgccgcaaaatgtccgactgcaaaaaggtgaaacctatactctcacagaagtgcaagctcctgctggacatgaacgtgggaaaacaacttggcaaatcgaagtcacttcagagggaattgtgacaatcgatggggatgaggtttctacagaagaacaagtgatcacactgaccgtggttaatctattttcagaattgccaatcggcattcgcaagtatacgctgcaagacggaaatgaagtaaatttatctggggcaacattttcgttgcaaaagaaaaattcttcagaccgttatcaaacgatcgctacggaaaaaacaacggattcaggggtagcccattttatattagatcagccaggtcaataccgaatggtcgaagattcaggtccattggggtatgacacgatcgccggcaactatgaatttacggtggataaatatggaaagattcactacgacggcaaaaatgtggataaacaaagtaaagaatggacgttgaatcatcaaaaccagttaaaagcctttgacttgaccgtccacaaaaaggccgacgatcagacgccattaaaagggacggaattccgtttgatgggtccaattacagacattgaacgatcaggagaagagacggatacgtttgtctttgatcagttacagccgggaaaatatgtcttgacggaaacatatacgccagaagggtatcaaggattgaaagagccaattgaaattgtgatcaatgaagatggctcagtacagattgatggcgaagaagtcgctgatgtgttagttgctggagaaaaaaacaaccagattacactagatgtgaccaatcaggcgaaagttccactgccggaaacaggtggaagtggtcgattagggatttatctactcgcctttagttcgatcgccatcgctggtatctacttatacctccagcgattagaaaggagggggtagcggatgaaaagcatgcgttggtttagtgtatgcatttttctagttgtgttactaggtttctcccaacaagtttcagcaggagaaatgcaagcgaatgttcgcatcacgttacacaaggtactatttcttgaagggcaattaccccaggaacaaatcaattccggagaaggtacattgcttcaagcttaccgcggtttaaatgatgtcacctatcacgtatacgatgtcaccgattctttctatcaattacgggaagatggtgaatcggtggaagctgcgcaaagaaagttggctgagcaaggtcctgcagccggatccctgattgccgaaggaaagaccgagaagatccaaggagaagatggtttacttagcttcacattagcagccaaggacagccagcagcgggataaggtctatttattcgtggaagcagaggctcctaatgtcgtgaaagagaaagccggaaacttggtcgttgttttgccagttcttgatcagaaagggaatcaaatgaccacgattcatttgtacccaaaaaatgaagagaaggcatacgatttgccgcctcttgaaaaagaagtgcagtccaaaacctctgattttacctatggcgagagagtgggttatcagctgtcaacacatatcccagaaaatatcttggattaccaacaattccaactatcggatacagcagattctgccttatttctcttaccagaaacgatcacagtaaaagtaggaacatccgttatgacaggatatacacttcaaataacggatcatggctttgtcctggatttctctattcagcagctagaaaaatttgccaatcaaaaattgcaagtctcttaccaaatgaaagtaatgaatgcagagcctgacacagagatcgtaaatgaagggcaattgctgacagataaacataccatcaacaaaaaagttgacatacggactggtgggaaacggttcgtcaaaagagatagtcaagatccgcagcgaacattggcaaatgccgtattcgtcgtaaaaaatcaaacgggagcctatttacatgaatcagcccatggttatcaatggcaaagagaaaaagcgggagctaaacgattcacttctgatcaagccggagaattttccgtcaaagggttaaaagatggtcactatttcttggaagaaatccaagccccaaaaaattacttgcttaatcaaaaagccattccgtttgtggttgaaaaaaaatcctatacaacaaatggaaaagcagctaccccactggcaatcatcaacaagaaacatactggttttttaccaaagactaatgagcaacaagcaacaggattgatcttagccggtgtagcattgataggttttgtcattgctgggctgattgaccaaaaacaaaaacgaggagaaagaaaatgaaacaagcaaaaaaagtatggtacttactaagtacgctattactaacattacctgtttttatcaatgggttgggtacagcagcttatgctgaggaaaatgcaagcaatgcccaaatcgtcattcataaaaagaaaatgaccgatcttccggatccgctcattcaaaatagtgggaaagagatgagtgattttgatcaatatcaaggtcttgcagatgtcactttccgcatttataatgtgacgtcagaattttatgcgcaacgagtagccggggcaactgtcgaagctgcaaaacaagcagttcaaggtctaaccccaggttcgccaatagctgaaggtataacagatgcagatggcaatattaccgtaaatgtaccgaaaaaacaaaacgacaaagatgctgtctacgtcatcaaagaagaaccaaaatctggggtagcggctgctgccaatatggtcattgccttcccggtttatgagatgatcaagcaatcagacggctcgtataactatgggacagaagaattatctacggttcatgtttaccccaaaaatatcgtttcaaatgatggggcattacatgtgaaaaaaagaggtactgctgaaaatgaatcgttgaatggtgcagaattcgtactctcaaaaaatgaaggttccccaagtacgaccaagtatattcaaggggtaaaagatggtctccacacttggacaaccgacaaaggacaagcaaagcattttgttactggtaaaagctatggaatcggcgaagatgattttacagaatctgaagagaaaactggtgaactaacggtgaagaatcttgaagtgggttcctatacgcttgaagaggtcaaagcaccgaacaatgctgaattgattgatgatcaaacaaagacacccttcactattgaagcggataatcaaaccccagtagaaaaaaccgttaaaaatgatacatcaaacgttgaaaaaacaacgcctaatttaaacggcaaagatgtagcgattggtgaaaagatcaagtacgagattgcggtcaatattccattaggtattgctgataaagaaggaaatgccaataaatacaacaaatttaacttagtagatacccatgatgatgcattgacctttgacaatacaccttcaggagatacagcctatgctctttatgatggtgatacactgatcgcatctgaaaactatcaagtaactgaacagacaaacggcttcaccgtcgctgtcgatccagcgttcatcccttctttaacaccaggaggtacattaaaatttgtttacttcatgcatctaaatgaaaaagcagatccaacgaaaggctttaaaaacgaagccaatgttgataatggtcataccaatgaccaaacgccaccaacagtagaagtcgtcaccggtgggaaacgatttatcaaagtcgatggggatgtttcatccacgcaagctctagcaggtgcctctttcgttgtacgtgatcaaaatagtgagggtgcaaactatttgaaggtcgatgaagcagcgaaaacagtgacttgggtggcaaacaaagcagatgcaacaacattcacgacgcaagctgatggtttagtcgtcattactggactaaaatatggttcctattatttggaagaaactgcagcgccagaaaattatgtattactaacaaatcgaatccaatttacagtggatgagcattcttacggaaccacagaagaattagttgctcctgaaaaagtgcctaacaaacacaaaggaacattgccttctacaggcggaaaaggcatctatctttatttaggcagcggtacgctgatcttgatcattgtgggtttgtatttcatgaaacgaaaagaaactcgttgattttctgttttgctagattttcacttctagaaaaattggcagcctcaaaagcagatctcagctatttcgacctagtcagataaaaacgggaggttgcaacagacgtggtccgcttcaagaaataagaaaggattttcaaaaatagcttttcccatttttttgaaaagctatttttgaagaagctgattctaaccgcttgttgaaccacttgttcggaaaacggagctgtgacaagtcttttgtcacagctcctttaatttttttgaggaggaaatgatgaaacaaaaaagaggacaccagatagtcgatcgattgatgatccttttgttgttgattggtgtagggattttttcctatccattcattagcgatgcactgaataattatttggaccaacagatcattgcgcattaccaaacagaagcaaatcaagaaaatgccgccgcaatggcgaagttgcaagcgcagatcgacaaaaatcaacagctagccaaagaaggcggctcccccggactggatccattctctgaagcagagaaaatcagtaaaaaaccagataaatcgtattttgaaagccatacgatcggtgtgttaacgattcccaaaatcaatgtacgagtccctatttttgacaagaccaattcagcattgttggaaaaaggcagctcattactggaagggacttcttttcctacaggaggcaaaaacacccacgccgtcatttcgggtcatcgtggattgccgcaagcaaaactatttactgatttgccagaattgcaggaaggcgatgagttttatttagaagtctacggcgaaacactcgtttatcaagtcgatcaaatcaaaactgttgtccccaccgatacacaagaccttcagattgaatctggtaaagatcttgtcacattgttgacctgcactccctacatgatcaatagtcatcgattattggtaagaggacaccggattccttatcatccgaaagtcactgatgacataaagaaagtcaaacagcaacaacagcagtttctgtggatcctcatttttactgcctgcggcttcctcgttttttgtatttggtggtataagcggcgaaagaaaaaaactgggaaccctccagtatctagcagataaaatgagttggctgatcaaagaaaccctgtttttaataaaaaatttttttgatttacagggcataaagaaagctgatttatttgctagccagcacaatctttgtatctcttatgctatcgaacctcccgtaagatgttaagaggattgacaaaatattcgcaaacgctataatgagggtgtattagtggacaaggacgtctgctaatccttttgaaaactagctatcaaagaagatacaataaacgtatacttatgaagtgtcagggaaagaggtgtgaatcctctacagacctacctactgtatggtggatgaaaccaatagaaccacagaatgattctattctggaaggattgggagtaagaagaagctaagtcaggataccggcttgataagtctattcattcttttgtaggaaaaagaagggtcttcgacgataactggcttgatctactgttagtactgttaatgaaccactttttctattaaaggaaaagtggtttttttgttttttgatacaaagtaaaaggagggatagacaaaccgtaggaaagaagaataatcgatttatccgtaagggttggaagaaaaaattcaaaaaaagttgaatgcgaggaaaaaaagatgaaaaaaattctaatgacgatcatgaccatcggactagttgctgggattggattagcgggttgcggcaaacaagagaacgaagctacggcttcaactgagaaaacagaacaaaatttgccgacgaaagaccgtagtgggaaagagatctcattgcctaaagaggcaactaaaatcgtttcactggttccatcagtaacagaagttattgatgatataggaaaaacgaatgaattggttgctgttgacatgcaaagcgggtcactgaatgaagcgcttcaggcattacctcaaatggatatgatggcgattgatgcagaaaaattgattgcattgaaaccgcaaatcgtctatgtgaatgacattaatttagcaagttctgaaagtgtctggcagcaagtagaagatgccgggatcacgattgtcaatataccgacaagtaccagtattcaagccatcactagcgtaacgacaagtactcagaaaagagccgatagttgtcctattcggacctcctcgatcaaaacaaagtcactatcacgaaagatagaatatggaatccagcacttgaagcatcttctttattttcctatgttgagagatgacacgtttcctgcagaactatggctgtactttgagaaacaacaagcttggttggagaatatcattcaaggaaaattctcggtgattgaacaagcgattgatcaagagcaagtagtgatagagagcagtcagcgaagacaatgggattattcttcaaaggaaatccaacttcaattgaacaaaatcctattcttgttcgaagaaaagcctgataggcgctatcagtatttccaagaatgggcggatgcgttgatccaaacaatgactgtagtaaaactgaactaggagatgaacacattggattcaatcaatgaaattgttgaagaagttatcaaacgaattcaactacaaaatcacacatttgaagtagaagcttctggacgtcacgtccatttgtctcgtcgagaaatcgatcatttatttggatcagggtatcagttaacgaaagtaaaagatttgtcacaacctggtcaatatgtatgtaaagaacgaatcactgttgcaggaccaaaaggactgttccaaaatgtcgtgattttaggtcctgaacgtaaggaagcacaagtcgaagtgtcaatgacagatacccgaattttaggtattaacgcgcctgttagagaaagtggaaagattgaaggaacaccaggggtgacattgatgaatggcgcaacgactgtttcattagatcgcggattgatcgtggcaaaacgacacatccatatgacaccagaagatgccctagcaaacaatgtgactaacggacaaatcgtccaagtaaaagtactaggcacgcgaccattgatttttgatgatgtagtgatacgtgtcagtcctcatttcgcgacgtatatgcatattgattatgatgaagcaaacgcttgtggtttatcaaaaggtgttcatggttacatcattaagtaagagaaggttggacaatgaaagcttctgaaatagaagaactggttcaacaaattactgatcgtatctgtcagcaactcccaaagcctatccttgctcttgctttttcgcaagagaaaaaagagattcctgccgaattatatacccagtttcccactgttcagtggagaaccggtgaagatcaagagtcggctggaatgattgtgaaacaactaacgatttctcaaatgtccagtattgctttactgcaagaaaacgatctattgacccgaagaatactttcatttttgttacaaggaaaaccaattcttgttttagaaactttgccagcaattccgaaagaaacaccgcttaaatatcaagtgaaaaagacaattcaagaatatcgagacaaatgtcagcagtttggtctgacattctatcgctccccgcaagactatgctgatttttggaaatcctgtcagaaaaaatcagtgcctaaggcattgcctaagcggaccttcatcaccgaaaaacaattgaaaaaaatgctagaataccgcattcctccaataaagaatgcgcaattgacaccattagcacaagattatgcgcgcactcaaaagttgcttataaagggggaaaaagcatgcttttaggaaaagttaccgacagtttgtggtctacaagaaaagacgagaaattaaacgggtggaaatttatgatggtagacattttgaatcaagaagaacaaaaacaaggctttattattgcagcggataatgctggcgcaggaattggcgataaagtattgatcagtcaaggcaatgctgctcgaatttctgctgaaaatccagaagtacctattgacgcaatgatcgttggcgtcatcgatgctgcagaggaagaataaggaggttgaatctatgagcattaatgaaattattatgtatattatggttctttttatgatcattggaggcattgataaatgcatcgggaataaattaggacttggaaaacaatttgaagaaggtatcatggtgatggggtctttagcgttatcaatggtagggatcatcacgttagccccggtcttggcgaatcttttaagtcctatcgttgttcccgtctatgaattgctgggtgctgatccggcaatgttcgcgacaacactactagcaaatgatatggggggatttactctggcacagcaattagcaaatgatcctcaagcagggttatttgctggagcaatccttggggctatgatgggaccaacaattgttttcaccattcctgttgcgttggggattattcaaaaagaagatcaacagtttttagccacaggggtgttaagtggaattattaccattcctttcgggttattggccggtggtttaaccgcaggaatgccaatgtctatgatccttcctaacctgctacctatcattatcgttgctgcattgatcatcgtgggattatggttggcaccaaacggtatgatcaaaggattccagatttttggtcaaggtgttgtcatcgttgcgattatcggtttgattgtcggagcgattcagttacttgtgggaattacagtcattcctgacattgcacctgttacagaaggaatcgaagtcgtagggagcatcgcattgactttagctggggcattttgtttggttgctgtgattacgaaagtgtttaacaaaccgttaatgaaattagggaaagttttagggatgaatgaagtggctgctgccggtatggtggcaacattagcaaataatatcccaatgttccaaatgttgaaagatatggataacagaggaaaaatcatcaacattgctttcgctgtttctgcatcttttgttttaggcgatcatctaggctttacggccggggtagcaaaagaaatgatttttcctatgatcatcggtaaattagtcggtgggataactgctatttttgtagcgatttttatggctaatcgtatgttagggaaaccagaaatagaaacaaaataatgaggtgaaaatatgacagagtttaatcgtaaaatgatcgaaactttggttcgtcaaatcgtaactgaacaattgatgccaacaaaacaagtggatcctagcggtgttgcatcgatcaagctaccagagatcactgtttctgaagaagatcgtttggatacagggaaccccaatgatattgtttatacaaaggatttgttctcactcgaagagagtcctcgtctaggttgtggattgatggtaatgaaagaaacaacatttgactggacgctcgattatgatgaaatcgactatgttatttctggcaaattagatattattattgatggacggaaagtctctgccagtgcaggtgagctcattttaattcctaaaaatagcaaaatacagttttcagtcgcagaagaagcccgctttgtttatgtcactttcccggcagattggcagaatcaataaatttgttgaaaacaagacactatatattttcttaagttgatacgctacatcaggtgttccttttatttatagggatgccttttttttaaaagaccctttagttaattaatatacgtttggaagaaaagatgttttttacaaagcatacgtgccgatctgtaggataaaaacgaagttctatgtaagtagacaggacaaaacaaaaaacaattgaatgagtaactcgtatctattgttcgaaatagttgcaaaaatggtttatttcaaatatctttaaggagcaacacgcattaatcatagaagagtattaggacaaaaggcttggggaagactttttgtagacacctaatactcttcgtttttgtattttatcatgatatcagctagtttgtattaaatggacgaaatttcgtccaccatgttttgataggatcctcccatggtgaattctggcgtgatcgtacaactcaatgtttgttttgttcaggctgatacgtatcttcgatcagtgtgtggtcaagcttttcagtctaaattcaattgcttcatcgtaatcatttatgacaagagcaatattttgtttcacgattactcttcctttatagcgatgcaagtatcattctgagctaaagccaattattcgccacaatagcggactaatggaaatctaaaaaattatcactaaataagccaaataattttatttaacgagggatgtcagccttaaaataatagcgaaatcactaaaaatcggcgggatatagttaaaaataaaatggagaaaaacttgcctgctttacgctcgatctcatatcttcgatcatttctatcagttaaaactcggttagaaatcgagcccaaaatagtccgttagtaattttaagtaaaaaagcaaatagtaataagaaaagggttcccctaataaaagatacgatcactccctcacaatctgatgagtaagagcaaatgcttgctctgaaaagtttgttttatcgctatctgtactattaacctttagtgaatcatttaacttgaaaatatttaaggatgatcgtaagatagttttatcaaatatataaggagtgttatctatggcaaactatgaagaaaaagaatcaaaagcattgttaaaaatcggagaagttttggacaagttagattctaatttagcagaattggattctctagaagcagatgctaaaaaacatagtatgaagaagtggattgttgagaaaaaagcgattcatgaaatcaagaagatcgcacacgaagcaggtaaatacgaaacgtatgatgagaaagaattacaaaaagagttggacgaagtagaaaaatatatgtaaggaagagacgttttcttttcgtttttttctcttattttagttaaaataaatttccagcacactaaggataaatttgcttgatcaaagggaagcccgcttgcttgttttgtgagtaaggaggcttctttgcttatacaagcgactaaaagaatgcatctgtcgcgatgctggtcggcttgactgttaactgataatctcagagaaggcaggttaaaaataaaaaagaagcaagataaacctcatagaaacaaggttcatctcactttggaaaaactacgaaaatcttctcgattttagtctatggagatggcgggagtcgaacccgcgtccaaacatattgctacctaaaaatctacgctcatagtcagctcatttaaggattcgctttacagcttgccgagtgacaggcagtctgtattgctagtctgatgttctcttttttaacttgcagacggaaagttaaaacgtatcccacttagaataggacccttactcgagcacatgggcgatgccgagaggatctacgctaactgtttttaggcagctaaagcgtaagagttttcgtttttagcagttatatttaactgtaacgttttaacgtagacgtaacctacgaagcgcaattcaggctcaactatgcctgtcgaatccgtaacatccccctgataaaaggggtatcgctaccaaccattagtataacataatttgcgctatatgcaaagatttagatcaattcaaaatgattcaaggcatgcacgatgccgccttcagtatttttaagagtaacaaaatcagcaatctcttttagttctggcaagccattacccatggcaattttatagtcgcaagcttctaaaagagcgaagtcattgctaccgtcaccaaagccaaatgttggcacatctttgagatttagtaagttcactaatgtcttaattcccgttcctttagaggtgccgcttttcacgacatcaattgaaaaaggtgtattgcggtagaaagtcaattcagggaactgttctttatagactgtttcattggcgatacctaatacgagcatcatattgatccggtctttttcataacggaatggatcgatttctggaagggggctgcggacataattgtaagcctcgatcatctcatcattgtgtccagttgcccagtaaccattctcgttataatatgaaagttcgtcgccatgatctctcacggcttccaacatccgtgcgcagagatttttatctaatgtgtctgaaaacacttctttgccatcgatacgaatgaatgccccattcatgacaatatttgaggtgatcccagcagcctcgcgaatagcaagaacttctgtttccgttctgccggttgcaatgattggtaaaacatcattttggcgtaagcgatgcatggcctcagaaatttcgggggtgatctgggagtgttcatctagtagtgtgccatctaaatcaaaaaatgctaaagctttataattcatacagttttctcctactcttattgacagttacaaaatcaatcttaacaaagattgctaaaaacgcaaacctttatgaagaaaccgtgaagttgttggtagataggaggttttcgagtatactagagaaagaatggagtgggaatatgatttttttagtgattggagcgattttctttttgatcggttttgtttttttgattctcccttcaaagaaaatcaattttatctacggctatcgttcttatttagcaaaacagaatgaacgaaattggcagtatgcacaaaagatctgtacgcggtactttctgctgtttgggggagtcatgacattgataggaatcctactgaagtggcagggatggaccaatttctttctcttagaaatgattgcaattccttggtttattgtaccgatttttggtttgatcgaagaaaagctgcaacaatttgatgaacaacataggggtgaagacaatgaatattctaatgattgaagacaatgaatctgtttcagaaatgatgcaaatgttttttttgaatgaaggttgggatgcgactttcaaatatgatggcaaagagggactggaagcttttgccgaaactccagaaaaatgggatatgatcacgctggatttaaatttgcctaccatggatggaatgatcgttgccagagagattcgcaagatttctaatacagtgcccattattatgctgactgcccgtgattcagaaagtgatcaagtgattgggctggaaatgggcgcggatgattatgtgacgaaaccatttagtccattaacattgattgctcgtatcaaagccctgcatcgacggagtgaaattgctgagaaggcaagttctgagacttcagacacgacatttgatatcgttaccgatcactttaaaatgaataccaagactcgggaggcttatttgaacggcaaattgatcgatggtctgacgcccaaagaatttgatttgctttatacattagcgaaaaaaccgcgacaagtcttttcccgggaacaattactagagttggtttgggattatcaatattttggtgacgagcgtaccgtcgatgcgcatatcaaaaagttgcggcaaaaaattgaaaaagtgggaccgcaagtgattcagactgtttggggagttggctacaaatttgatgatgcaggtgctgcctaatgcggtatctttatcaacaattgattgcgttttttgctgtgattctagtcattttgatgacgattggagtagcgtttacccaaatgaccagacagacgttgcaagagcgcaattacgagcaattgatggggtatgcctcttccgtagcaaaaatttcccagatcagtgactcagaattttttcagcagaacatgacgcgagatgaatatttgcagtattcactacatcttgctgaaaatattctgagcaatcaagatatttcttttgctttttttaaaagtccgaaagaacaaatctatccattagatacggcgggacgagcggtcgactttagcatttcagaatcagattggcagtcattgcaaaatggtggtcgattacaaatgacttcgaataccaatttattcggcgaacgagagttgacttcctatgtgttgattcctttttctgttaatcggacggatttttatggcgtgatggtggtttcacaatctgccagcaatattttgaatctagtcagtgcttttaatcagaacttattcaaagtcttcttgatttcgatcattgtttcgctattgatcagttatctattcgcgactttccaagttcgacggatcaatcggatgaagcgggcaaccaaagaaattacgaatgggaattttgacatctcattacctgttcataatcgcgatgaatttgatgaattggcagaagactttaaccaaatgtcccagtcattgaaagagtcgcatgaagaaattgagcgtcaggaagaacgacgacggcaatttatggctgatgcttcccatgaaatgcgtacgcctttaaccactatcaatgggttgctagaaggattagaataccatgcaattccagagaatcagcgagacaatgcgatccgcttgatgaaaaatgagaccaatcgtttgattcgtttagtgaatgaaaatctggattatgaaaaaatcagaaccaatcagatttctatggtcattaagaagtttgatgcgaccaagacaatgaccaatctgttgacgcaattggaaagcaaagcagaagtcgcaaacgatcgtttgattctggaaacagaggagtcgatcgacgtctatgccgactatgaccggtttgttcaaattatggttaacatactccaaaatgcgattcaattcacacaagatggtgagatccgcgtgcgaatcgaaaaaggctatctagaaacgatcattgagatttctgatacaggaatcggtatgtccgaagaacaagtcaaaaatatttgggatcgctactataaagttgatccttctcgaaaaaatcgacaatttggtgaatcgggattagggttatcgatagtggaacagttggttcgcctccacaaaggtaaaatcgaagtcgatagcgaattggggcaaggaacgaccttcaaagtgacttttcccgatatcgaaatagaagaataagctagaaacatacagtatgcttttatgcagtgatagacaaaaaggaaaccatcgtcatggatggtttcctttttgtgtacctataaaatagaaaagtctcattgttttgtgatatagggggtatgagccaagcgttcatcttcattcattaaatagatcgatagctgaaattgttttgctagttgactgcataaaggcagaagggcttggatgtcggcggtatgtaaattttttgaaagagtctctaaaactatgaccggtttttccaataaaagtgccagtaacaattgtactttaacttcttctaaagaagtgagttcatctaaggatcttttcaaaaaagtcggttctaaatgaacggcagttaacagctcttccaaaggtttttcttttttattggctaaggaaagattatctttcaatgatagaaaggggacatactgccattttggctcgatggtaaccgcttggttagtttgcagaaagtgtgccaacgtctctttcgcagcaaggtcattggctgcaagatagaaaagacctgggatgtttagttgattttttggtttttccattgctgattcctccaataaaaacagtggctggtgacgacgactaacgtaatgattgagactgaaccaacgagtaggacaaaggtttggcgtaaactttttagaatcattgacaaccattcattgctgttcaattcaacattctgaatgaatgcttggcttgtttgtggaatcgtaatgccgaaatccgctgttgtttggctattgaccgactgccaaatctgcaaggaggcatcttctctgtcgaaagttgtgatatgactggtaatcatttctcgttgaaagaaaggctgaaatagaatcagcaatgcaaagacgaggacgatgattgcgagcagtggcaggaggacttccaagagctgcattcctacccattgccgcgaggaagctccgctcatcagccatgcctgaaattcctttcttttcattcgttggtaaaaaataatgaaacctgtgaaaaccaataggaaactgatgaagatcaacagaaaaagattctgataaatagatgcaatcggttggatctcttgtgcgatttttgccggcatttcttcgccaatcaaataatctttggcttgtgtaaataattggttcaatgagtggagcagagtatcactaatgattaaaccaatcacggcaaaaaaggtcaacaatccatagaggatcaatgcttttttatgataatgaatgctggctacagcaaaacgaaaagttttcattcaattcacctcattctactatctagtataaaaggggagtttgaataaagtatgaagttcttgtacaaaaaaaagaaagtcagcggagacttcttgattttttgtgcaaaaaagtaccgcgagcgtttgatcgctcgcggtactttttgattgaagcttatttatcggtctctttgaccatttcttcgtattctttataggtcttcgtgtgatacaaatcgacggtcgatttctcaccattttttgagaagacactcgttgaatcggcaccgagttctttttctttggcactcaatttttgtaaggcatttttgtaatcatagttatctggatcgacttctttcaatccgcttttcgcatagaagcgcaacagatctccattattaatttgatcagagaccgacagttgtttatcaactttggctttccattcatccacttgcttttgtaagcttgcagaaggacttgggatcgccatgccagtactgttactgtaaaggacgcctccgtaataagtatactctggtgtaacaaagtcaccgtctctaaatgcaacgagctgttcgttttgtttcgagaacaaatcttgacctaattggatatatttcgaagtatctacacctaacagatgaagtaaggttggtaaagcatccacttgaccaccgtacgtatgattgattccgcccttcgattgtccaggaatatggatcatgtaagggacacgctgtaaggctgcattatcaaaattagaccagctagcgctatctttaccaagcaattctgctaagtttttgtttcgcgaatttgaaataccgtagtggtcaccgtataagacgatcacagaattatcatacaaaccagattctttcaagtagttgaagaattcttcaactgctcgatccaagtagttggcagtagcaaagtacccgttgatcgtttcatcagaagttgttgctaacgggaagccaccttcatcattggtaaattcagagtatgggtagtgattagagacagcaataaatttggcgtaaaatggttgttgcaaccgttccaagtattgcgctgattgttcaaaaaacggtttgtcatgcaacccatattggaatgagttatcttcgttgacatcatagtaagaagcgtcgaagaagtaatcatagccaaagcgtttgtaagtctcgtttcggttccagaaggtaccagtatttccgtgaaaaacggctgatgtgtagccttgtgtttgtcctaaaatatctggtgctgcttcaaaggtattcttcccgccaagttgcgtgaagagagccccttgattcaaaccaaagagtgaattctcaaaaagtgtttccgcgtcactggtttttccagctttgacttgatggaagaaattatcaaagctaaatgtgcttttactatgatacaaacgattaatgaatggcatcacttcatgttctacgccattctcatcttttaatttataatcgatcagaaattgttgtgtactttctaaatggacataaatgacattttttcctttagcgatcccgaacatgtcgtcattaggttctgcataatgctgcttgacataactttcgacttcgttcatatcattgggactagcttctgctcgaacttgagaagcttgatacgtctgcacaccatcataaacagtaaatgcattgatccctaaatatttgaccaggtaatcacgagaaaaagttctagtcaataattctggacgatctgcttcggctaagaataaatttcctgagaagatcattactgctaatgttgaaatggcaaaagccatccgagctttaacgggacgctgatccattttgattttcttcataacgagagcggcaatcaaaatgacgaagtccacgaagtacaataaatcgtaaggtctgaaaagacgaatcgcactttctcccagaccactagcaacttttccggcaccaagcatcgtattgatggtaatgaaatccgtgaactctcgataataactgacatttgagaacagtagcagtgtcatcaagaaatagatggcgatcatggtgatataggctgcttttgttcgtctcacatacagtgcgatcgaaagtaaaaataaagttgttgcgattggattgataaataagatgaagtattgcacagtgctttcaatcccaaggtggaagtccaccaaataagcaaagatattttttaaccaaaataatagggccaatatgaaaaaaaagcccattcttgtattcacaaaagtggatactctattttttttcaaaggaatcttcctctctctttccagcttaaacgaataagattcgaatttacatcatcctatattctactagtccatcgaaacagtgtcaatcgaattccctgtcgtggtgcggaattaagtatttctttactttcaagattacagacaaagaaacaggtttttgctatacttatcaatagaatgaatggagcagataaacgatgaaaatgaatttaagcaaaaaaggaatcaaaaaattccataaaaaaaacccattgatccaagaagatgatctcctgcaagtcaaagacacacaggattgggtctcttttgtcgattcgcaagggaaaattgtcggaaccggctatctagggaaacagaataaaggcatcggctgggtattggcttttgaagattgtccgatcaacaaggacttttttgaagcagcttttgcaaaagccaaagccaaaagaagtgcttactatggcagtgaagaaacagatgcttttcgtatcgttaatggagaaggcgaccacttaggtggattaacgattgatctctatcgagaatttgccgtattttcttggtacaacgaaacattgtaccaaaataaatctctattgatccaagcgttccaacaagtttttccagaagtcaaaggagcggttgaaaaaatccgctttgactctgatctgccagaatcagcagccgtctatggagaggaggcgcccgaaccgctaattgtgaaagaaaatggcgttcactatgctacctatcttaatgagggactgatgaccgggattttccttgatcaaaaggaagtacgcggacaactcgccgaagggctgtcagcaggcatgacagtgctcaatatgtttagttataccggtgctttttctgttgcagctgcgatgggcggtgcgacaaagacaacgagtgttgatcttgccaagcgcagtttggagaagaccaaagagcagtttgcaatcaatggctttgatccagaaaaacagaagattcatgtgatggatgtttttggctattttaagtatgccaagaaaaaagagctgacctttgatatgatcattttggatccgcctagctttgcccgcaacaagaaaaaagtcttttctgtcgcaaaaaattatggtgaactggttacggatagtttggcgattatgaacaaggaaggcttgttgattgcttcaacgaatgctgccaacctttccccaaagaaatttcaacaaatgatcgaagaagcaatggatcaggcacaagtcacgtatcaatgtacacaagaatatcgactaccaagtgattttgcagttgatcctaactttttagaagggaattacttaaaagtattcttttaccaaatcaaaaaggagtgagacggatggttcaagtaaagtcaattgagttggatggcaagcacccgcgcatttgtgtgccgctgactggaacaactaatgaggagattatcaagcaagccctagccgcagaaacatcggatgcagagatcattgagtggcgggctgattattataaaaaagtcgatagtttatctgatgttctggatgtactttctcatgttcggaccactctaaaatcaaaagtttttctgtttacgtttcgaaccatcgaagaagggggacaaacccctttcactttgacacaatataaacatttatgtttaggcgttgcagaatctggattgatcgatatgattgatgtggaactggaaaaagctgagtttttaggcagaaactttattcagaaaatcaaagaacatcaagtgaaattggtgttaagcagtcacgatttcgacaaaacaccagaagatgctgtgctgatcttaaaaatcgggattatgaatcaatttggcgctgatatcggaaaactagcaatgatgcctcacaatgtgcaggacgttttgcgtttgatgggcattatcaataaagcgcggggattcaatcaattacctttagcagtcatgtcaatgggaaatctaggcaaaatcagccgcgtcagtggtagtctgatcgattcagtcatgacttttgctgcgctggatcaagcttctgcccctggtcagattccagtggagcggatgaaagattatttagctgagttttcaatcgaaacaatgaaaaattaaacaatcgggaacataaacagaaaaaaatgggacagactagtcctatagtttcgagcagtcttaaatgagactcttaaaattgaagttgtaaagaaagaaccagaagtttggataaatgaggaatgcgtcatggcaaaagtaaaaaaaacaaatgcgattcggatggtagaacaaaagaaactctcctatcaggaatatacgtacgaatggtcagaagatcatttggatgcagggtctgttgctcagcaaatcgctcatccagaagccatctataaaacgctggtagcagttggcaataaaacgggtcccatcgtcgcagtcatccctggagatcacgaattagatttgaagaaaattgctaaagccagcggcaacaaaaaagtagaaatgttgcacttaagagacctagaagagaccacagggtatattcgcggtggatgttcaccgatcggcatgaagaaactctttccaacctatattgatgaaagtgcgcgacatttggaagaaatcatcatctcagcaggaaagcgtggtttacaaataggactgtctccaacagatttgagcaaattagtccgcggacagtttgtctcgctgactgctatttctgaagttggctaaacaggaacagacaaaacaacagagccgctgcattgaagtaggatacttcaatgcagcggctctgttgtttgttctatggacaattattccataacggaaatatcaaagacttcaatattatctaatccaccataaaattcataccatggggtagcatattcttttagaatagcattcagttcttcgacattttcccggccttgcgtatctaaccaatcaagcagtgctttttccccttgttttccatagatttccacgctgtctcgccaagttgcacgtccgccaagaataccagagaactttgccccgtgttcgccggcaaagcgtaattcttctcggaagatgtttgcaggaacccctgcacttaagtaaatgaaaggacgagtagcggcatcgctagcttctctaaagtagttggcagcttcttcttgggtatacacagcttctaagccttctttttgaaacccttcaaccaaatcaaattgtacgggtacttcaacttttaaaatatcgatatggtatttgtctttggtcaattcttgaatcgttcgaatgacttttccaggtttgattttagcgaaagccggtgatttatcatcggtgatttcatcgtcgtagacgattggttcgacaaaaattgggatatcggctgcttgtgcttccgtacctaaacgttctagaaaagcatgtttcgtatcaagaatctcttgcggttcatcaggattgtaataaaccagcactttagctgcgtcagctcctttttggactagacgttgcagagattcatttggcaacagctccggcaatcgtcctggagtattgacatcataaccggttttttcataagacagaatcaaaccagcattaggatttttcgcttcgatgccttgaaatccatattcttcatccaataaaatgctgctgacatactttgtcaattcttgtgaaaccaaccgtttgaagtcataaatttgttccattttgaaattatcgggccctgtggcagctttcatcatttttttcattgatcctcgctgatcaatggccaatgccgcaatcaccccatcttcatttgaaagtttctgcattttttcaaatttgcctcttgaaatacgtttcatttgtccagcctcctttaagttctctttcagtctacgccttctcacaaaaatcgccaactaataagcaatttctagaaatgcaaacaaaaaaacgaagctttgtcactaccccgcaagcaatgggatgtgacagcaactttactcagatgcaagtctgcgaaagtttcgaaattccttgtatttcattgtgtcagatcgttaagagaataaagactatccttgtgaatagtggaaatagctcgccatttctgccgcatgcttgccagcgacatgaccagtacaaaaggcagcagtgatattgaatccaccggtataaccgttgatatcgagtaattcgccgccgaaataaaggccattgatgcacttactttccattgtcttgggattcacttcttttaaatgaatccctccacccgtcacaaaagatttttccagcggaaatgttttagaaattgtgacagaaaagcctttcatgatagctgctaaagcctgtagctggtcttcagttgtttgctcagccaccagatcagaaagtgccagtcgatggataaagaactctagcagacgttccggcaagatgccgctcagtgcattgactaattttttcttcgaatgggctgccactgttagctcattcaccaattcattcgctgttttttctggaaaacaatccagcatcactgtgacaggtgtatgactcttcaattcttgattgacaaaagaagagcagcgcagtgcagctggacccgaaagcccgaaatgcgtgaacaagagatccatggtatgagagacaacggtttttcctgtagaatctaaaacagataaagcaatatcttgtaaagagatgccttgcagtgtgcgtgctttgataaatggctcctctgatatgaggggagactcggtaggataaagcggtgtgatggtatgccctacttttttggccattttgtagccgtctccagttgctccagtcgaagggtaagttcgaccaccagtcgtcaggatcacacagggcgcagtaaattcttcgaattctgttcgaacgccttggatctgagtctcatcatgaagtaatttagtgacgactgtattggtcaatagagtgacttgtttctcatggagcgcctgtaataagccttcaacgatcgttttcgatttgtctgtgacaggaaacatccgtccgtgatcttcttctttcagagggacaccatgggattcaaaaaaggtcatcacatcgaaattattgaattgcgagaatgtactatataaaaattttccgttgccgggaatatgggcgatcaaatcatcgacagagcgatgattggtcacgttacaacgaccgccgccggtcataagcaattttttgccaacttttttatttttttctataagtaatacgtctgcaccgttttcggctgctgaaatagcggccatcatgccactggtcccagcaccaatcacgatcacatcataggatttcttcatcttccttcacctctttgtggattgtaccatattgcaggaacaagcggggagaaagctgtttgttcaatgaatcgaaaaaaaattctgacaatttcgtaaaaaatagatgcaatttctgaaattttctataaaatagaatttaactaaaggaggtagtgcctgatgacaaatgcttcagagtatgtaaaagcgatccaagagaaactgcacgaaaaagatcagaaccaaacggaatttttacaagcgatagatgaatttttaccaacaatcattcctttcttagaaaaacatccagaatacattgaatcgaatttggttgatttattaacagaaccagagcgatttattcaatttcgtgtgccatggcaagatgaccaaggcaattggcaagtcaaccgcggttatcggatccaatttaattctgcattagggccttacaaaggcggcctgcgttttcatcccagcgtcaacttaagtatcttgaaatttttggcttttgagcagattttcaagaacagtttgactggattaccgattggtggcggcaaaggcggaagtgactttgatccaaaagggaaatcagatggagaagtcatgcgtttttgtcaaagtttcatgacggaattagcaaaacatatcggccctgacttagatgtgcctgcgggggacattggtgttggtggccgtgaaattggctatctctttggggcttacaaacgtctgaaacaatatgatgctggtgtccttacaggaaaaccattggacttttggggaagtaaaaatcggacggaagctaccggttacggggcagtctattttgttaagcatctgttgaaagatttaaaggaaaacttccaagggaaacaggcaattgtatctggaagcggcaatgtagccatttatgcgattgaaaaattgcatgagttgggcgcaaaagccatcacttgctctgattcttctggcttcatttatgacaaagaaggtatcgatctggcattattgaaagaaatcaaagaagtgaaacgggaacgtttgacagcatatgccaacgcacgcccctcagcagagtaccatgaaggcgcttctgtctgggacttcgatgttcaagcggaattagccttcccttgtgcgactcaaaatgaaatcaatctagaacaagccaaacgggcaaaagcgaatggtgtccggattgtttctgaaggtgccaatatgccaagctctcttgaagcggcagaatattttattgcgcaaggaatctactattgtcctgggaaagcggctaatgcgggtggcgtagcggtttctgctttagaaatgagtcaaaactcacaacgtttgcagtgggagcaggcagaagtcgatcaaaaattggatgagatcatgaagaatatttatgatgcttgccgtgacactgcagaagaatttgatcaaaaaaataatttcatgctaggagcaaatgtggctggatttgaaaaagttgctaaagcaatgttttctcaaggacttgtctaactctgccagataggcgatataataaggaattacttgaaaaaagttcaaaaaaaacgtaaagtagtacttgtatgaaaaactaatttttttcaaggaggacaaatcatgtcacacatcaaatttgactattcaaaagtagcaccattcgtgaatgaatacgaattaagctacatgcaaagtcaagttacagcagcagataaactcttacgtgaaggtactggtgcaggtaacgactttttaggctggatcgacttgcctaaaaattatgataaagaagaatttgcacgaatcaaaaaagcagcagaaaaaatccaatcggactcagaagtattagttgttatcggtatcggtggttcttatttaggggcaaaagctgcgattgatttcttaaaccattcattctataacttgctttcatcagatgaacggaaagcaccacaaatcttttttgccggaaactcaatttcttcgacttatttagctgatttgatcgaaatcatcggtgatcgtgatttctctgtcaatgtcatttctaagtcaggaacgacgacagaacctgcgatcgcattccgtgtcttcaaagaacgcttgatcgaaaaatatggcaaagaagaagcaaacaaacgtatctatgcaacgacagataaagcaaaaggtgccgttaaagttgaagcagatgctgaaaattgggaaacattcgtaattcctgatgatgttggcggacgtttctctgtcttgacagctgtaggtctattgccaatcgctgctagcggtgcggatatcgatgctttgatgcaaggtgcagcagacgctagtgaagcatatgccagtgatgaccttgaaaaaaatgaagcgtatcaatatgcagcaatgcgtaacatcctttaccgcaaaggaaaagtaaccgaattgctgattaattatgaaccaggaatgcaatacttctctgaatggtggaaacaattatttggagaatcagaaggaaaagaccaaaagggaatttacccttcaagtgctaacttctcaactgatttgcattcattgggtcaatatatccaagaaggccgccgcaacatctttgaaactgttgttaaagttgaaaaaccacgtaaatcaatcacaattcctacgcaagaagctgaccttgatggacttggctacttacaaggaaaagaagttgattttgtaaataccaaagccttcgaaggaacgttattggctcacacagatggcgatgtaccaaacttattggttaagatcccaacgatggatgcctacacattaggttatacaatgtatttcttcgaaatcgctgtaggtatttctggttacttgaatggtgtgaatccatttgaccaacctggcgtggaagcttataagaaaaacatgttcgcattgcttggcaaaccaggcttcgaagagcttgcaaaagaattgaacgaacgtctataaatcaatacttctaccacttttataaatttgtggtgaacgaaacatgttcgctttagtttgtaactggtgatagttttggtgatagtgacagagtaaaagcactcattgtgagtgcttttttctttcgctttcgatgtagttttcgaactgttccatggacctctttttgacctctggagaaatatgggcatagatttgagttgttgaaatatccttgtgaccaagaaagtcttttatgtcttctaaggacaatccagcttgacgagatcggacagcaaaagtatggcggccatcgtggactctaattttcggcaattcagcttttttagcaatccgattaaatgcgccattcactgatcgatcacggacaattttccctttgtatctcttgctggtttgcaagaagataaattgttctccatcttcagtggaagggaaggtaccaaagatgtttaagatatgatttctaaaagcaagcagagcttgtttacttcttttggtcattggcatgcttctgactcctgccggtgttttcggatcgtctgtaataattgcattgacgttttcacctttttcaactgctcctaaacgttctctttcaatgcttatcatgttcccgccaaagtcaatatcttgccactgtaatcccattacttctgatttcctcaatccttgatcgaagattaataggaaaaaggagtaccacaaaacctcagattcttttttcgcaaactctagaaatctatctgcttgctgcaaatcataatatctgatcgattcttttttatcaatcaatcttggaaactcaacgaattgagttgggttatcttttatatatcctaattgaattgcttttttgaaagcattgctcagcgtcgcatttacgctcttggcagtagtgatggacaaaccttgtccgcttcttcctaaacctgcctttgtaagtagtagattaatgaatttttgatgatcagctcgagtgtatttgttcaaagaatattttccaatatagggaatgatatacatccttatattggctctatgaactactcttgtaccttctttgaccgcttgtttataattgtttacccaatcttcaagaaattcttctatagttaagttctgtggattttctttgaaatattcttctgatgctatttttccttcaattattttggcataactatttgcttcgtcaaatgtcttaaatccttttttgtgtatcttattttgtttccgggttccgggattgattccattagaaatgaaaacttcatatctatattgttttgccttcttcaaatagtatttctttatagaagccatcaaaattctccttacgtttttttaagtaattaatctgacattagatagaatttaaacgaataagtagtcggaaaaacggatgtattcgaaccacattcacttcaatacgaatgtatgttctttccagagtaaaagaaaagcctccaggcttttctttaataattaaattcatgaagaattacttttttatgagagtgtaatttaacatgagaactagcaaataaaaattctgttgctttggtttttttatttgctgaatatagcaactcatatttatatttttgggctacatctgcataaatttcagaaatttgaggggctgtatcataggttaaaatccaataaaagtcatctaatttatctatactttttttcatttcaacatgtttttcaggagtaatgaatgataaatataagttttgaccttgggtgaaatagggaggatcgaaaaatataaatgtattatctgaattgtatttttctcgaatgatattgactaaatcattagcgtcttttcgatataaagtgatatcttctcgacgattagcaatcgcacgtactttcccagtaaggctagctttgttgaatcggcaatcaagcttatattttcctttttgctcatatccgccaattggaccaccgctaatgattccgctgacgtttgttctatttaaaaagaacgttgcaaaaccgccctcaacagagttcatatatgttcgatttttcagatagatatctttttgtttcttccattcttcaatcgtgacaggagtgttttccaataaataaataaaatgctctgtgtgattaattatggcattccaaactgaataaatagatttatcataatcattgataacgatatgtttgacgacaccatcgaatagaagctttaaagaaacaccagacccacctgcgaacggctcaatataggtggcgctttcgatattattcaattcaattaagttggccacaaaatctgatagttgtgtttttccaccaggatatcttagcggagagtgcgtaactggcattttctacacatcctttttaaattgatgataacaaaataataagtttatggccaacattataattgtttagctttgttttgcacttctaagtgatcgagtgcattgtttaattgtttaatgaatgaatttagctgatcaatattgttattaaagtaatctttcaaaatttgtgtttcttcaacaaataaaatcatatcttttgaaatagatttaatataatcaaggtttaactcttcatcatctacaagaaattttgtgtctacgcgttcgctagtataatttgcagtatcaggatttctatcaaggcttctccaaaaatctctatgttctaagtaatttttacaataatcataaatcacggtataaataaatgcttctggcggcaaaaaactaggaagtgctataatattcttttttaaattttttggcgtttttcctttatcgaattctttattttcaatccaattttttatagttatcttttctttagatttggcatcgccatcaagaacaatcaatacgtttttgaaatgtacgtcgtgatcaggtagtttttctagttgattacaacctagaaaaataggtatgatatcaagctccacagtatttatttctaatttagtgtgtgcggacaaattaacgatttggttaaataaccaagcagtctgttcgtcttcacaatatacttttattttaggagatatactagaaatatcatcaaataagtcagccttcaagctattataatcatgataagaagtcaaaaaaggatcccttatcccttttaaatagtttaacctgtatttattagaatcattattttgtaaatcaatcattcgctcgagtaaaataattgaatgagatgtaaaaaatatctgaagttttaatttgtctgctaaaatgattagcaaatctaataatttaattgctgcgctaggatggaaggaagcttctatttcgtcaataaataaacaaccaccattatatccattttttaaagacaagctataaaagtcaataagtgcagatatgatactacctaaattgtcttgacctactgattgagtattggcaaaactatctactaaaggcataaataatttggatgattgagtaacatttttgattaaagtctctatattatcggactttgtatctattgatccaggcagtacagcattataccactctttatattcattaaagtatttattttgatagatattagtattcttactaagttgttcagtttctatatcagattcaccaggagggagtaatctagataaacttacgtatatagaaggaataggaactcttgaagaatcagtgagacctaactccattttaacttttgttttggctgattttacgagttcatcggaattaggatttttagtaattctaggaatcgggcgaattccacgatttgattctctataatcattaaaactaatccttttatagaaatcaatgcctttttcttcatttaggaattttgtgataacactataatctgaaaaattttcttcaggatttataaaaaaataatcagtaaactctggttggaaggttaagttatttactcttttttcactagtcccactgagtgaagcaaaaagagagagcaaactagacttgccaacaccattatgtcctgatagcattgtaatattacttccaaaatgtaaagtatctagatgattcaatttcctgaaattttcaatgtacgcctctttaaatttgtatgtcattttgtcctccaatcatcattttttataatcctctagtctaaatcgaaccgtcgtcaacagtaggggagaagaaaaaactaatttcattgttatttggaacccccaaaaatgttgatctttgtatttgtcaataaatagggtagacatttgaataagtaactgtgaatattcgattgctctatatttaagtaattagttctttggcgctctgtaaccagcagattcggcttcagatatagttttgaaccaagcagctggattcgtagttttattataatacctgcttcccgggatatgatagatgccgttatttgaacctttaattaatccgtttccgttggcgtctacgtattctggttcagtatattcttgttgcgattgttgactttcaacagtctgatgatctaaagattcggcggtctttgcttctgcctcagctgcctcggtttctgctttttctttggatgccgcagcttcttgagcagctttttcttcttcctgttttagcgctaaaactttagtattgggttttacaattatttttgcactagtattaccaccatcaaatctagaatttatagtgagttcttcgtctttatcaccagttagagaatgatttaaagaaaatttcccatctttgtctgcttcaactgagtcaccaattatgcccaatcctacagaaaccgatgccccaggatttgttgttccagtgattacggcattaccttcttcgtcaacttctatttcttcactatctaatttaagttcaacaactacagaattagtactagaattctctgattctttaattgattcagtagttgttgtagcagtttctgccacttgtttctcatcatttcctgaaccaagaatacccaccaatgcaaatgaaattgcagctaatcctattgcgatatttcggttactcgtattcggttttctcttaataaaataccaaataccaatgcaactgaaaataaagataaaactaaacaaccccgtcatttacccatctcctaaaaattattaaatgattttaaaactgctacagtcccattcggttggaataggagagtgtagttgttttctgttttaatgccgttccattttcttgtataccattttactgcatccttaaatgtgacttcagatacttgcaaatgttcagcacattcccaaaccgaaacacatcccgcctcaaaacaatctattatgtcaaaaggcgatactagcatcacggcaccgatatcacgagctcttctttcttgcttcctattaaacggattatttaagtctgatatatcgcccacagaagttaaatagtgagcaatctcttctgaaatagtagttgccagctcaattgcagattgacctggcctcagatatattgttttcccaataattagaccattttgatgatccggcatttttttttcaaacttgtatgtaagttcatcatatttggccatcaattcttcagaaacattcaaatccaagcacctactctttgttatgatctctcatttttataaatttgatgaaatcttgaacttcttttttctgtttttcagtcaagtcatcatctacgtgagttgcaacaaggaggttagggtctgtgttagattcggtaccatttaataagtaatcggtagtaacaccaaaaagtttggcaaggctaactaatgcttctgaattaggttcggctctgcctacttcccaactcccaatagtttgctgagaaacatttaactttttagcaagttcagcttgggtccatttctttgaagatcttaaagcttttattctatttttcagcatgggcagctcctccttcactgtgattatatactacataatgtagtagaaaaaggaaaaaacgagtattacaataaaatgtagtaaaaaacgttgaattactacaaaaagtagtatatgattactacataaggtagttaaagagaggtgataacaatggaaaacgagttgaaaaacgttagaactgtcaaaggtatttctcaagaaaaactggctcaaaaactttcagtatcccaaaaaactgttagttcttgggaagttggtcgtactactccgaagccaagtcaaatgcaacaaattgaggatttctttaaggtacctaaagagaaaattttttttacagcttttaactacaaaaatgagttaaaaagaaaggaggcgacacattgctaaagcaacaagtattaaaaccagaaaatatcaaatccatcgagcttaacgctaacgggtcagataagtgctatacgaatccaattgtgattaacggaataaaagctggcaaaggtatcaaagcagtcaaattagatttagtagctgataaagttcctaaagtgatcattatcggaacacctccacttatttcagatgaagtcaaaaaagcgtggggcttagatgattctgaatgggaagatactacagacggtacggtaacggttaatgtgaaaattgaaggtgtaccagaaaacacacttccactttattagcttaaaaattgaaaggagtgattatcgtgttagataaaaacaaagcgttgaatgcatgcgaaaaattaattattgagctgtgtgaaatgcctgaaacaaagaatagccccgaaatggttgcagccattgcgaagctattaaatgtaactaagaacctataatctcgacgaaaattacgtttgctaagttaacgtaaaaactactttggggagacgtcgatattgtcagccctacgatgttttcatcacttggctgggttgaaagttttccgtcaaaagttgtccagttttcgtctactgacttaattctaatcttttgaccggatttaatagcacttataatatttgctttcataatttcaccacctttcatagtgaaattatagcaaattatattggtgttaaaccgcaaatttaatgtcaaattacaacacaaggaggtctccaaatgaaagacaaaccacaaacaatcaaagcaaatattgattctggatttcttaaacggtacgttgaaatgattgttccagcaatcaaacgcaaatttaatatctctattggtattgaaggcgaactgtttacaaacactggcggtgttgaagaaatcattattcgtttcttggctactgatgaagtagcgcaggacatttattcatatatcgaagagaaatggcagttcgcctcaacaccaaagcttttagcttaaattaattttaaacaattattgaccgtttggaccaataacaataacgaatataaggagtgataacgtgccgaaaacagcaaaaattgggcgatctttaaagctagcattatttctttcgagtaaacgtcagaaagaattagccatcgacgccaaaacaccaaatgcaacaatcagtgatcattttaacggagccaatgtccccatcgataaggcaatcgagtatctagaggcaatgaaagaaaatgggtatcaagcaactgatgaattaacaggagacatcagttaccaatacttaggatttttcaaatcaatggatggccaattagcagatgttaaatcaacgaatgatcttgaaatctttcaagaaatcgagtcgaacgaaaggaaagaacggaaaaaagtagttcagagaattgttgctgaatctcaagtcaggatgctaactgatgttgaaaaaacagagcttaggagttacacagacgagtttcttgatgaaatcattgttgaaatggcgattgtattctccatcctaaagattctgaacatcactattcaagaggcaattaaggagcgtatgcctcactggattaagaaaagatatatgaggggatgacctaaagtgaaaatttctcaaatgaagaatgttttaccgcttgagagaaaaaaagaaattaccgaagttgagtggaaaaaagccaaagaaattgctgattatctaggcatctcaagaccaacattatcgaaactaacacatcggaaagtagatccaattcctttttcaaaacttagtgggatgctccaatatgatctgcaaaaagttaaggaatgggaagaacgtaatcgaacatacaattacaaggaggcataaatcatgaaacggtcagttaaaaatacatttatagtcacagcactattgctttttgtagtagcttttacagcaattcatgtaatagcaggattagttttagtatttctatggtctttcgcaaatattgtctatgacatggctgcaaaagattatcaagacaaagaaaaaagacttgctagccgaccaaagcaatagcaagtcacaagaaattcttttgaaaatatctttgtctccattttaaaacagaaaaggggaaatgacaatgaattctttcgagaacgcattagatcagtatctaacaacaccggggtggggacagccgactcaaagagaggagccagaaaatgagaagtaaatcaactcttgaaatgactcatgacgagtggttattagatcgccgaaagggtataggcggctcagatgttgccactattttaggactgaataaatggaaatcaccgtatcaactttggctagaaaagactgatcaaatcgctttagaacacattgagagcgagccagcttattggggaaatgtcctagaagaaattgtagcaaaagaatttcaagaacgtactggtaaaaaggtccgccgaagaaatcaagtgtttgaacatccgctacatccttttctacgagcgaacattgatcgggacgtagttggagaaaacgccattttggaatgcaaaacagctaatgcatttcttggtaaagagtgggaaggcgaagaagttcctttaagttatttgtgccaagtacagcactacatgaacgttttaaataaaaaatattgctatatcgctgttctaatcggaggacagaaattcatctggaagcgagttgatcgtgatcaagagctaattgacatgattactgaacgacttgttgagttttgggaaacaaatgtcctggatggacaagagccagttatagatggcagcgaagccacatcagagtttttaaaagaaaaatattcgaacactaaggaagacgaaacaacgttacctacttcttttgatgacttaattgatcaaaagcgtgagctgaagaaagcaaagaaagagatcgaaacggctatccgtcagattgataacgagattatcaatgagcttggaaaacgcaaagcatgcattggtattgcaccaaggaacatcatttcatggaaattggtttctacgaaacgtatgaacagcaaaaagcttgctgaaaaatatccagaagtagctaaagacgaggaaatctacaacgttactgaatcacgaagactcacagaaaaggagattaaataatatggccacaaatgatgcattaaagagtcagctcgctgagaaaccacaaaaacaagttgctgctggtcagttagggcttaaagcattgatgaatacaccaacaatgaggaaaaagtttgaggatgtactcaaagataaatcagatggatttatggccagtgtcctgaatctagttagtaatgattcgtatttgagtagcacagagcctatgactatcgtaacaagcgccatggttgcggcttcacttgatttaccagttgataaaaatcttggttacgcatggatagtaccttacaaagggaaggcacaatttcaacttggttataaggggtatattcaattagctcagcgatcgggtcaatacaaagcactgaacgtgattgaagtgtatgaaggtgaattaaaaggttggaatcgattaaccgaagaatttgaatttgatcagaacggaaagcaatcagatgaagtgatcggatatgtgggatattttgagttattaaacggtttcaagaaaacagtgtattggaccaaacaagaaatcgaagctcacaaacggaaattcagtaaatcagattttggctggaaaaaagattatgatgctatggctaaaaaaactgttctaaggaatatgttgagtaagtggggaatcttgtctatcgatatgcagagagcttcaatcagcgatgaaactgtggtgaatgaagttcaagaagacggctttatcatatctgaaaacgatgagaccaatcagcgaaaagaggctgaaccaattaatgacacagaaactaacgaaaacattgaaagtctgtttgattcatcaaatccaccgttaaacaaataatgagggagtttatctccctctgattaggaggaataaacgtggcaagaccgactaagaaaggtcttgattattttcctctagatgtcgattttttatcagatctaaaagttcgaagaattattaaagcatgcggtaaagaagccgttcatatactggtcgccctgctggctaatatttatcgtgatgaggggtattacgttttgtgggatgacgaccttgcgttcttagtggctgacgaagttggtacgaaggagggcacagttgaagaactggtgaaaaaagccgagcaagtaagattctttgataaagatatttttgataaatactccgtattaacttctaaaggtattcaaagcagatacattctggccactaaggaacgcaaaaaagttgagcttgattataagtatttgctgacaaatgaagttaatcgatcgaatatctcgattaatgggcggaataactcggttaatcaggggaataatcaacaaagtaaagaaaaggaaagtaaagaaaaggaaataaaagaagatgctactgcgagcgagagtgcgtctcttgaaacttttcaaaagttatggctctttccgaatgttgtacaggtcgatgatctacttaatctggtggatatttatggcgatgaacttgtaaatgctgcaattaaacttgctggtagtaaggacgttcctaagaatcgagccattagttttttaacagcttctctacaggaatgggcagatgctaacgtaaaaaccattgaacaggcaagggagtaccaacggacaagaggtgctaaaaagcaaagctataatcaaaagccgattcgtgaagaacagcttcctgattgggcagaaaatccggttgaagaacctcagatttctccagagagacaggctgaaatcgatgccaagctagctgcctatttaagcgaaaagaatcagcgaaaggagctagactagtgaaaatcattattcctattgcgcctaaaccacagtcgagaccacggttcaccaagcatcgtaagactccttacgaggaaacagcaatgaaatcatacaaaaatgcggttaagtatcacgctatggccacaaagccgatgctgattgagaaagggcctgtaatgattgatgtctgcttttttatctatccaccggcttatatctcgaaagtaaagaaaaacaggactttgcttgatgatgagaccatgtactgcgataagaagccagacattgacaattactttaaagctgtaaccgatgcagtaaacggcattttgtataaggatgacggacagattgctgtgagtattagtcgcaaggtatacagttggaacccacgaacagaaattgaaattcaaccactttaggaggaaaaaccatgagattacaagacacttttgtcattcatccggagggacgtcgctttgagattcaaccgaaggtcagaccagcaaaaacgaaagtaaaagtcggcaaaatatacaactgtgccatcgaaggattttcgggactggttagagcagaatgtctgaaaatttacgagaaatctgcacatgtgagaattattgtctgtcataaggaacaagacgagtggcggcagaaagttcttggtgatcaaactgttgttaagctgaaaaatatggttttagctagataaggagtttgtaatcggaagaaagaaggtaatttatgggagaaatggctgaatactggaaagatgcgaagccttacctgaaagagcgtagaaagcagcatgttaagcgcatgggcgattcagcgataaaaaatatcaagtctttgggttttgagtttacccattatccaaataatcatcaatttgcgatcaatacgccaaaaggcatgattgattattggggaacaactggtacttggattgatcggaaatcgaaaagacgtggcagaggtctgcatagtctgaggaaattcgttagcggtcgttagtcagcaattggaagatattaccaacttgagaatctgtgttttagaaaataaaaaagaaactcaaagattatttttttactgatatattcaatatatactaaattaaagtcaagaagaatatttgatctatcgattatgatattcatcgaaagataacgaataaaccttggtagttatgttgatatcatcattcaattccgaaacaagtttcatacccagattctctgccactcttttggaagcgatatttgaatatttcatgtaggaatatatttctggaaacttcaaaacattgaaagcataatctctacaggcctttgcagcttcagttgcataaccatttctagtgtacaatttgttaatatgatatccaatttcgggaagaagctgaccatcaatttgttgcatcgtgattccgcaatcgccaataaaaagattattttgttttaaaatgacagcccaaaggccaaatccaagtttgagataattttcgagattccactctatccactgcatagatttttcacgcgaaaatggttttggatagtgtttcatagattctggatcggaaaaaataagatggagatcgtcaaggtcacttttctccattcttcttaatattagtctgggtgtttcaattatcatgtggattccactcctaaacttaaaatctcgcctatattgatacaattatgccatatgcgaaacaatacaacaagttacttccgtcaaaattactggatggaagaaataaacaactaggaggaaaggatgctcaagttaatcacgttagagaaaattggctttaacaactctataaaactaaatgatctttttgatcatgaagaggactcgtggattgtacgagctatttctggcaaccgcattaaaggtcgatatattaatactggtggtattaatggatttcagcatgacctaatcgaagcgactgtagtagcgcaaaaaatcggtacgttctcggagaaactgaaaatgcagatggagctacggcttatagtattttggaagaaggtcaatatatagatgacgaagattaagagtaggaataagcaaatgaatgatagtctatccatcatcataatactgttatcgatcgctggtctaagttggctatcctatacaattgtggatcaacaggagcagattgaacaacttcaagagcagctgcagcatgagcagatgaagtacaagattattatcaatgatccgttagtcagggatgcaatggaagcgggaggatgacagatggaattaaaaagatcaagcattgaaaaaatgagtgacggaataggcctcttctttcagggaataggcgaggtgttcgcagaggttgtatctgttgtgtctaaagtgttcaagcaaattgactgtaaaatgctagcgaaagtttcaaatgacccagaaataaagaagtattacgcaatataccgtagaacaaaaaactccagaatcaagaagaaacagttaaagaaaattaaagccgcactatatggagataagttatgacatttgcagtgttagggttcacaggatttgtctttttagtagctatctgtgtagttgtcggtaatgctacagataaaaaggagcaagattatggaggaagctattttatggaacaagatggctttgatagtggaaacaattctgatggaacaaataaaagaaattgaaacgaaagcaaaataaaaaagcattaagcagccgcccaatgccctacaaaataatgattttgtacccgccaaggtaatttcattataccaaataaaggggcgattgagcaatgatgctattaagagagatagattttcgtaggactaggcagaatgcaaaaagcattttgagaaattatcgtcggttggagcggattgctggtcgatctaagattgatgtccgctcaccgatcatcactgatatgcctaaaacaccaagcaacggcaacaagtcagaagatgcgatcatccagatgatggatgcggaggcagaaagggatgctattgtagtagctcttttggcgttgggaatagatagccgccaagttttgtattactcgtattgtactgtcgatcgatattcaaatgttggcattgctcagcaaatgggttactcagtcaggacaatcgaagattacaaagcaaccgccttgattgaattcgctgaagcctatcgaaaaggaaaattaatagaatattgctgaatcgatgtggtttttatgtggaaatactgcggtttttgcatgattttgcgtagtattattgtagtatcaactattgtaaataacagggcgcactcctttatgattgttggcagatttctcctttctgaatttcattttcagcgccctgtatttaaactaagacggcgacaaaaaatctacaatagaatggagctgaattcaatccttttcttcattcgctagccgtctttcttgtattatgtcactgtggcggaataggtagacgcttcagaaaggcattccgattttagagacttaggtgctatgcagggtgcaaatccttgccagtgactttgggagttgtcgattggattactcacatgatctttgatacttcctacttaacagcctttcggggctgtttttttacatagaattacaaaacaaacacagattgcgaggtgagatcatggcaaaaggaaaatacttggaatggctgactaaagaaggccttctgaaaattgagggatgggcaagagatggacttaccgatgaacaaattgcggaaaaaatcggtatacagcgccaaactttgtatgattggaaaaaaaagtattctgacatttcttacgccctaaaaaagggcaaagaggtaatcgataggcaagttgaaaatgctctgcttaaaagagcactaggatacgaatacactgaggatgagtatgctgtttttgaaatggaagaaaatgaatattttgatgcacttcaaagctatatcttgcatttcaaacaatcgcatccggaagctactgatgaagacattgatttggcgcgagataattttccgcgtacaaaaagagtgctagttaagcagaagacaaaggaagtagttccggacacaactgcacaaatcttttggttgaagaacagaaaacctaatgaatggcgtgataagcaagttgtgcaacatgatggagaggtaaaagtttctaatccttatgcaggtctaaccactgaggaattgaggcgattagctcatggccaagacagcacttgattctgaaacagtaagaaaagaagcccagaaagagcttgccagaagagattatggtgagttcttttattattctcatggatcaacatttaaaccattacctcatcaaaattatgtggcaccattcttgcagcgtattgcggatggggaacgactttttattattgttgaattaccacctcaacatggcaaatcgacatttatcacagaaacttttccagcttactatttaatgaaaaatcctgataagttagctatggttgtctcctactcagaagagttattcaaaaagtttggtagaaaaaaccgtgaaaaattccgtttatacagtgatgaattatttaatcttaatatcagttcagagactgctagtgtttcagaatggggaatacaagatcatttaggacaactgtatagcacatctattctcggtggcgctacaggtcgtggagcaaatttaatcattatagatgacccaatcaaaaacagagcagaagcagaatcaaaaacaattagagataaaatctatgcagaatggcaagatactttttattctcgtttatctgctgatggatcagttattgtcataatgactaggtggcatgaagacgaccttgcgggtagattgcttaaagaaatgaagcttccttggattgaaataaaaattcctgctattgctgaagaaaatgatcttttaggaagaaagccaggacaggcattggcacctgaaattggtaaagatgaagagtgggctgagcaaacaaaagctgtaaccggttctcgtggttgggctgcactatatcaacaaagaccaacacctgcgggaggggacatttttaaaaggtcatgggctaaattttatgtacctacaatagacatgaaagttaagcttggattgggtgatgacgttgcaatattgcctagttcattcgacattcaattgcaatcatgggactgtacttttaaagataaagacacatcagattacgtttctggacaagtttgggggcggtcaggtgtggataactatttgctagatcgtcatcacgagagaatggggattgtcgatactatgagagctattcaggttatgacatccaaatggccaaatgcggtagctaagttgattgaggataaagcgaatggatcagctgttattgaaatgctccaaaagaaaataaaaggaattgtcgcgattaatccacaaggtggtaaagaagtaagagcgcaagctgttgctcctctatgggaagctgggaatgtttatctacctcatccattgtggaaaccatatacagatgagattcttgatgaactaactgccttcccaaatgctgatcacgatgacgatgttgacagtatgtctcaagctttggtccgcttggatcacaaaccaacgagaacaagaagaacaaaaagaaaaacagcattttaggaggtggtttcttgacatcaaaaatcattagtggtggaacaaaaggatctgttccagataagtacatcaaaaaggacgttagcatcaagaaaaaacgatcattaagatttaaatcggaaggcggacttgatcaaagaagagatttgacgcaattgtctccgccttatgatattgctactctacgatcaattaccgatatttccgacattctaaatcaatctattgaagcttatgtaacgaacgtggctggatttggtttgggtttacggtataaagtagatgataccgaagaaacagtagaaatgaaggcagaatggaatcaattggatattcttcttaaggagttatcttttgaacgtccgccaaaagaagtaattgaagaggtaatccgacacgttgaagaatgcggtaatggctacattgaagttattcgaaatttgaaaggtgacgttgtagggattgattctgtcaaacctgagtatatgactgttacgaaactaaatagagtagtaaatgcagatggaacggaaattaaagtccgctattttgtattccgtgactctatggatgattctgtaacagaatctggtacgtggtttaaaacttttggtgatcctacacccttaaacgcaaacggcagcattgcagcagagggagaaggaactgcaacagaaattattcatctgaaaaatggcgactttcaagatccgtatggtaaacctcgttggattggtcctttaattaagattctgggaaatcgtaaggctgatgaactgaattataggtacttcacacaaggacggcatatcccactcgctatcactctggaaaatgcccaattaaccgaagaatcagaagctacgttacaagcatatgcgaatgcaattggcggagaagagaatcagcataagtttttattgctagaagctgagaaggtgagtccttctgaagagatgataggggcgggagaagataaattcaagccatctatcaatatcgagaaattagcagacattttacaaaaagatgctttgtttcttgagtatgatgaaaacgtcattgaatcagttcttggggcgttcagattgccgccaatctatgttgctcggtctagtgattacacgagggctactgcagaaacggcaaaggagctgacggaagaacaagtatttcaacccatgcgtgaatcttacgattggcgtatcaattcgctttttagagaatatgagtttaaatacgttgaagtattccttaaatcctccaatttagtgaatatggaggatgtgaaggcaattctcacaccggctatccaagcaaatgccgtggctccaaatgatctgagagatattctttctaaagccctaaataagccgctagaggcatttgacggtgacgagtacaattatccggtaaagaatcaaacagcctcatcagctttaaatcttggtgaattagacgtatccaaagcttatggcgaaggagaggtaagtgaagttgctgcaagtattcgacgtatgatccggagtgtgaaggctgatgaatgatgaagaattaatcaaagccgctctacagctaaaaaaagaagaagatgaagaattagccaagcttttagaaaaagctggctttttgtttgttccgattttgctcaagtatattttgcaaaccgaggataagatggatgacacgctacagattgattatgaagaagtctgggagaaagtacagaagttcctggagaaacggacaaagagacccaccaagttatctatcaaggtcatgcttagaggaagatcgtttaaatcaaatatgaaaaacaaggtcattcctgaattaagaaagactttctttgggttatttgatgaattcaacactaaatatgatggaaaagaaaaatttgattatcgtactaaacactatcgggatgttgaaaaatggcttaggaatctgcctaaacttatgaatgttaccacagaaaatgccatcatcgatttaattcaagaatctttcgatgatggcaaaggaattcggtggcttgaaagaaaactttcatctttacctgagttctctcggaaacgtgctaggacaacggcaatcaccgaggggttaagaatgtactcaggcagccagtatgaagcgttcatgcaaaatgatgctgttattggcatgacttggcgacatacacatggtatcaaagaacctagaaagggccacgaggcgatggacggtcaaacaattgctaaaggcgagtatttcatcgtcaatggcgaaaactgccgttatcctcgtgaccctatgttatctgctaaagaatcgattcattgccattgttttgtagtgccggaaataaaaaataattagaaaggtggtgagaaaatgcgaaaactagaaaacgttcttgtaacacatgtttcatacgtggataaggcagcaaataagaaatcattttttcttactaagtctgctgaagatctaaaaccgacttttgaaacaaaagttaagcttgttaccaaggctgacgatccgcaaaagctggtatatggtgttgtttatgagccggacgttgaggatgttcatggagattacatggatgctgaaacgattgagaaagccgctcatggattcatggctgattatcagcaaattgacaaacaacacgatttcaccacaaatgccggaaaggtagtggaaagttatgttgctcctgtagatatgaatattggagataccacaattacaaaaggcacgtgggttcttgttacaaaggcaactgatgaaatgtgggaatcgattcagaaaggtgagttcacaggctattctttagccggaactgctcaagtagaagaagttcagaagcagactactgacaattttgaaagagggaaaacataccgtgatgttaatgcggcgattgatgcttttagatcggctacttggtctatcttggacaactatacagacagcgatgcagataaagttgctagcattcaatcggaaataggtgaattatctgcactgattagcacaattaatacaactaaatctgttacaaaacaaggactaatcgaaacggttaagtccttttttagtacaaagaattccgaggaggataaggaaatgacagaagaacagttaaaaaaagcgcttggagaagcgttgcaaccagtaaacgatcgattatcagctttggaaaaaggcgataaaacagaaggaaaaccggaaacaacaaattcagacgttagcgatgaattagatgcagccgcaattgctaaggcagtttcagaagccattgcaccactgaaaacgaagatcgagaatctcgaaaagtctcgtatcagcaataacactgaacaaaattacacagaaacagttgagaaatcggttgtaccatcttatgtggacgctgctttcccaatttctgaataagggggaaacataaatgacaaacgttttatcaaacgaaacactattaaaacaaatgaatgcaatcttgaaagctggtaacaatgttaccttacgtgaagacaatgctcgagcattctttttagatgctgttgcaactgcaggaactatcggaaaattatttgtccattttgccaaatcaggcacaggatctttggataagttaggcgttaaaaagcgtacattgaaaaaacatctaggtatcaacactgaagatactggcacggatatcaaagaagaagatacagtaccattctctcttgttccggtttatttagatacatggatcgagaacagcaatacattttatactgctcgtacacgtgggcaagatgtccgtcaagcgttgctttcgctgatgcaagcacaatatgcagccgatttacaagacctagctttcaatggggatgaatcttctaccgatccattcgtgaaattaaacgacgggtatatcaaaatggctaaagcgtctgctgtcgttaaaaaagaagcagaggcgttaccaactattcaagaattgacacttgcaacaaccggtattgagccgaaatatttgcgacaaggtacttttaaatggttcatgtcgcaagctacagcaactaattacgtagtagaattgcaaaatcgtaatactgctcttggtgatgcagtaattgtagatggtaagctacggaatattgccggttatgatgtagaagttgttgagtcaatggctaatggggttatcttgtttacgccttacgaaaaccttgctgtcgtttctggtttaactgttacattgacaactgctgctcaagacagccgtgctgttgcaaaacaagcaacatatcacttcatgatggatgatgttgatttcatcattcgtgaacctaaagccttagcatacttcggtcttacagcgggggagtaactgtccccgtgaccggcgtaacaatatcgcctaaaaattcaagtgcagtagcggggactgccggaaatagacaactaacagctaccattgcaccagaaaatgccacaaataaagcagtgacatattcaatcgctccaccaacagaaggtttaactgtttccgcttctggaaacattacatggacagaagatgttccagctggtgtatacacaacaacagtcgaaacagaagatggatcgttcactgacaccaatgtcttaacattgactgatgctaaatgaggtgaacgtctatgaatatatatgtagatgaaaattactataaaaccgactttgaagggacgccagttgattcaaaggatttctctcgctattcaaagcgtgcttctgcagttattgattcactcactgattatcaaattcaaaaaattggaatagataagtttactgatgaagtgcaaacaatgattaaaaatgcttgctgttctcaaattgaatactaccagattgaggggatcgatcttgatgcgagtggaagtattttgagcggacagagtgcctctattgggggatttagctactctagtagcaaccagtcaattagtaaacaagcaaatcgtgttgctcctggttgtctttcgtaccttgagggaactggacttctgaaaaaaaggagagtgaggatcggtgtcatttaagccaatacctaaacacttattgattcacgaagttctttatcaggctcctaaaactgaggatgatggttctatgggcagtggagaattgcctaaggcacagaggatcgaacatgtgagatttactcctaagcgcaaaagaatcataaagacggataatacagaggttttgactaacggtgttttatatatagatgccgttaattcaaaaccttttgttaatccaagcgaagacggaacaatcacatttcaaaaccgcaaactaaaaattgttgaatgctacgaggtttatactgatcaattgagtccccatcatatcgaggtgatgctacagtgagcggtcgatttgaaggtaattttgatcgcataaatcgagctattgactctgctttgaatccgacgtcgatggcattcgccaaggcagccaatcagtacgtaaagaaagacactggagcaaccgaggccagtgtttggtctgatagtaattttccaaaagggaaagttgtttggggaacagagtatgctggatatgcctactatatgggtactccttcaaaaaatcataatcctcaagcttctatcagatgggctgaggttgctaaagctcaggatatggatgaggtactagctgtggctgaaaaatcaatcaaggaggcgttgtgatggatttgtttacgaagattgctgatcatttgcgatctttgggattaagtacgccaagattaacaagtgatggcaagcagatcattcaagaagacaagcctcctcaagataatgaacgagatttagctattcaaggaattgctactggccaaggtcaaaaagacctagctagaaatagacagatcccttttatggttcaaattactatcaagaataccaatcaaacccaagcatttaatgatgcttggaagattgcagatagctttgataaattgccaagaaaagaaaatgaggaatgggtcacactccgctcgagtgatggctcatttttatttgagtcgagcgaagtctatacacaacctagaaatctaggaatacaagaacatgatgcgtatatctatgtgcttactgttcgagtaaatattactaagtaggaggaaaactcatgaaaatgaatttacaattttttgccgataagactggttttctgtcgaactggatgaacaaatacgaaattggggcagttcctgttggggacgcagaaccaaccttgtttgagttagcggatggaatccagacagtagatcctagtaacgatgaggatacggaagaatattcttattatggcgacaaaggtggtaagcaaaccgaagttactggattatctagtgcttacgcatttactggacatcgaaaatacgctgatgatccagctcaggaatttgtacgtgatcgtttaactaaaactggtgttgatcgtgttgtttatttccgacacactgaaccggacggacgtattcgcgaaggcgaggcaactttatctggtattgttcatacgggtggagatgcaaatactcgtggaaattttgaatgtacagtgacatttaacggattgccaaaagatacaaaaccaggaacggtccctgagggctagcgtttgctagcctttttctacataaaaattttaggaggaatcattcatgacaaataaattaattgaagttggttttaaaaaacaagtccaaccggtacgaattgctggattagattttgaaatcaagacaggcaagaagtatcgtgatcagtatttagcagctttacctaagatgcttgaaggtattcaagaacaagagaaggcaattaatgaagcatccaagtctggtgactatggagctattgttgaagcaaacaagaaggttgagctagttgtaaaaaatgttattgatctagttttaggagaaggggcatttgaaaagttgatgtatgctgccgatgaagatatagatttggtagttggggcattccttgaagttgctgaacggtataaaaagcttcaaacaaaacaaaaagcacaatcctatatcgacggtaaaaagaaatagaggtgatgctttatggcattatctcttgcttggggaattgatgattcgattatcatcaataacaacaaatatgaactaaatctcgagttttctcgtgttcttcgatggtatgagatgtggaaagatccggatttatccgagatggacaaagttctttattctattattttaattgtatcaattccatggtcagatgatccaccaacaagcattgaaaatctggtatcaataattccacaagatgacttagtaccgttatctaatgcaattattaaacggattgcgggcgagcaagtggaaagtacaacagtaaaacgtgatttaaaaggaaacattttagaagacgaggaaaagaagtggtacgaattcgaacaggattccggctacatctattcctcttttttgatggactatggcatggatctgatggaagaaagagaaaagggatcacttcattgggataagttcaaccatttattagctgggctatcagagaacaccaaatttaaaaatgtcatcaagattcgaatgatggactatccggaaaaagctacaccaagtgagattgaagaaattagaaaagcgaagcttgctgtggctttaaaggaagatcgttcaaacattgaatttgaaatgatggatctcaagcaaaaacgtgaatatatgttgaaccaacaagaaaagagaggtgaggtggaggatgaatgatggctcggtaattattgatgtcgaatttaatactgccaaagctcgaaaacagtatcaggaatttgggaatgaagcggctcagcaattagataatacaatcgggaaatccaaagccttcaactcactttctgaacaatcagtagaatttgcaaaaaaggctagtttaagcattcttgccgttggatctgcagttgctggtttttcaattaagtcagcggccgatatgcaagcgatggatgcacagttttctcaagtttttggaaatttagaaaaaaatgctcaaggtagtattgattcaatttcaaaagagacgaatatacttcctaatcgtttaaaaccggcatttacttcgatggctgcatttgccaaaacaacaggaatggacacagccgatgcattggatttaacgagtcgagcaacaaaagcagcggctgatagtgcagctttttacgataaatcaatcgatgaagtctccgaaagcttgcagtcatacttaaaaggtaattatgaaaatgatgcggcactaggtatttcttcaacggaaacaacacgaaatgcagctgccaacaagctttatggcaagtcatttaatgatttatccgaagcccagaagcagttaacgcttttgcagatggtcgaagatggaaataagttgtccggagcattaggtcaagcagcacgtgaaggtggcggactcgaaaacgttatggggaacatgaagcaagccattacagatttgagcgctgcttttggtgctcctctacttcaaccatttttggatattgttcaaaaagttagtggagccatgtccaaacttgctcaagtatttcgagagaacccggcacttgtttatgtagtggttggagcagtaacaacattggctgcagctttcggaacagcttatctggcagcaaatagattccaaaatttgaggaaaatattcgaaggtgttaaagctggattagctattttaacaaatccagcatttctagttgtagctgcgattggggctttagttactgcctttgtgtacttttataaaacgagcgatacgtttagatctaaagtagacggtgttgtaaagactttaaaagcctttatggcacctattggggatgtcgttaaaggtattaaattacttgctcaagcatttaaagcgattgtattcaacgactttagtgtgagtgtgtcagatcttcatgatcaatttgtgaagctatttcccgaatcattatggaaaggaatgactacttttgctcaaaatactaaaggaatagtacaaggcattttaactttggcaaaagcttttaaagccatagcttttaatgacttatctgtaagcatagcagatttaaaagcggattttttagaagtatttcctgaaagtttatggaacggaatgaccaaaatagcttcaggaatccgttcattaataaccgggtttaagagtggtgaaaaatcaatcgacccttttggaattgctcttaaagtcttgaaagcagtatttcttggattattaggtcctattggactatttataaaagcatttgaattagtcgcaaaagttcttggcggtggggatgtttcaaaaggaatagatcaaataattagtggttttgactctctagctactggactagcagaaaatgcgccgagaattggaagttcagccgggaaagcgattgaggggattctaacagcaatagcgagtgcacttccaggcattattgcgggcggtttaagaataatagctgcaatagtctctggaattgctcaaggtctaccttcaatcgctttatcagctagtcaactaatttttgcatttactggctcaatgatgcttttgattccgcaaatagctttatcagcaacagcgattattgttgcgttacttgcatcactaaccgctggactacctcagattattgttgcaggtggagcgttgattttggctttattagacggaatcacacaacagattccagctttgatagaatctgctgcttcattaattctgacatggattactgcattaacagcgtatataccagatatcattgttgcaggtatgtcattactaattgctgttattaacggaataactcgaaagcttccagatttagtaacggctgtaggaactttgatagtgacatttttaaatgcgctctcctcgcaactacctaaagttgttgttgcaggagcaaaccttattgtcaaactactgaatggactagcttcaaaaatgcctgctttagtttcggcagctttaaatcttgttgttcagtttattaatggaatagcgtcaaaagctagtgcagtggtgacagctggtgttaatttaattgttcaaatcttacgtggaattgcgaataatataaatcgcattgttgaagcaggcatggatattgttgatgctgcagtaagaggtgttttgagagcgcaagatcgtcttttcaaagcagggataactcttgttaatggacttgcgaataatattcgtaataatcaggcagctatgaaagaggctggagcaaatctgttaagtgcgttagttggtgctctgccaggtggtgcattgattaataacggtattgctttggtaaacggtttgctgagtggattgacatcaggatttgaatcggttaagagaactgtttctggctgggctgatactatcgcaagtttgaaagggccaatcccttatgacaagaaagttttgattgaaaacggactggcattagtagctggcttgaaaacaggacttacagacgggttctctgatgttaagtcggatgtttctacatgggcaactgaacttcaaagaggtattgaatctgaatttgattctaattatttcaatgatttaattggcaatattccaacagagataccagcgatgaaggcgttaatgagtggtagtttaaagccggagcaaaattcagctataatagcaaatctaaataaaccagttaatcaagcgaaagttgctcgtaatttcgctgatagcactagctttctaactagcttgaccgatgcaattgataaacttgctaacaggcctgtcgaagcaagctttaaaataggcgaaagagaaatagtaaaagccattgctcaaccagtaaaccaagaaattttgcgaatacaacgtaggcagaaacgaagtcaggaggggataacttgattacagtaacttatgcaggatatgatattacaaagtatatgatagtaacctctcttgatcggggattgctaccaggaatcgaatacaacacaaaaaaagttgggcggtcagatggtgagaaatacgtagatcgctcaattggtcgtaaaatgataccaatgggattcaagttacgttatgaccttataaaaaagcggagagcgcttgccgagatactagctcaaaaagatccaaagccattgatttttagcgatgagccagataaatgttggtatgcaatacctacaggagatattagtgttgcagagaataattttctgggatccggagagattaattggattgtaccagatggcgtttcttatgatgttaatcctcggatattttctaatatctcgattgatagtgcagagaatcaagttttagatccggaatttcgaaagaaagataagtattacaagcaatggaccgctcgattaaatgaaatgaacggtgctcataatatcttgggtgctgatctaagtgatacaaacactattgctgataaaggtgaagtaaaatacaacggcttttatatcatgcaaaatagcaacagtacagcacggaatttacctgagctaaaacaaggagataatgtttggggacgtgtagcactaagaatagataaggcgttgcaaggagatacaaacggatcaaaaagtgcggttgcggtgattcaagaattagattatgcaggcggtaaggttcttgcttctcatgaagcgaaacctgccgctttaaatttgggcaatttccaaaatctagatattcattttactatttcaaatccaaataccaaggcactaaatctgatcacctgtttagcattaggaagtgcagtttcttattcaaagctgcagtttaacttaggggaaaagctcgcagattttgccgaaccaaccgctcaattggccgattatgttgctgtgacaaatcacggaacatataaagcttggccaattctcagggcaactatgaacggtgaaaatggtcttgtgggtgttgtcaatccagacgacggtattctgcaatttggtaatgcagaagagcttgatgtgattgaagggcaacgaacagataaagtcatcagtattccaatgaggaataatgctagtaaatttgagttgaacagtcctaaggcaaaaccggattacccaaactatggaggaaatccagatacgccaaacaaaatcggcggggacgttgattggacaacaagagccgatgttgtgatgccaatctggccagagaatcatgatggtgtttgggcaggaccaaccttatatactgacattcccaaaaatacaagcaatctagataccgggaacttcacatatagaagtcgatttgacttcgaacctactaagactacttccggacgtttgacatttactctgcagaatagttcattgggaagtattgtttcttgtgtgatacgtgatagttcaagagtcagagaagagcttatcgtagaatttagttgttttgataaagttcagaagcgtttgacacttgaccgaaaagaatggactggtcgcttttgggagattcagattcagagaacgagtgatacaaccgtggaatggaaattttccaagtggaaggcttttagcggtgaaggaattattgcctcaaaagcggaggttttttcaacaactttacctgaaatttctggtgtgggtattgatggactttgcacttggtttcagaaatggggcgatgatccgactaatgagcatgccctatatatgacatggactgattgtaaattttattgggataacgaaacaacgtttactaatatacccaatctatttgatgatggggatgttttggaaattgatgttttaaatcgcaaggtatttttgaacggatttgaaaactttaaacttcatgcattgggcaatacctgggaacgatttgcggtggagccagggacaacaacattcttacccgttgctagtagttgggcaaatatttttgattttgaagtagaactaaggggggcatatatctaatggatttttactttacagatcgaaaatttaatttattgggaatcgcctctaccagttctgatgcaccaatttcaatttttaatgatcaagatattcttagtataagcgctgcctctcgaacgtttgaggggacgcttattttttcggctaaagaacgagatcaagtcaaatcaatggccaactatgggaactatattttgtataaagatgaaaatggccaatcaatttttatgacgatcatggaaattgaacacgatccgaaagagggcgaacatttcattcgagcagaagatgcaggaatggatctgatcaatgggttggtggatgcatatagtgcaaccaaagcgatgacatttgcagaatatttcaaactgtttgccggagatactggttttgaaattggtatcaatgaaatcagtaatctcagtcgcacgttaaaatgggagagtgaaagtcagacgattctcgctcgtttactctcgttagctactcagtttgataatgcagaactgagtttttcatttgaaattacaggaacacaagttgttaagcgatacgtggatgttcataaaaaaagaggagcagataaacgaattaccttgtatatggataaagatatcaataatattgtgaccaaagccaatatctatgatctatgtacagctattgtggcaactggtggtacgccagaaggcaagaatgaaccaattaacttaaaagggtataactacaaagatccaaatggaagattcttgttaaacaagacaactggtgtcatgcaggatatggagtcagtgaagatatggagtcgattactatcaaataataatccaaatccgaatgccggacatatccaacgtgtgaaaacctacgaaacgactgatcaaaaaacactttgcgacaatgttatccgggagcttgaaaaagcgagtcaaccagcgatcaattacgaaactgatattgcaaatctaccggacaacgtaaagataggcgatacgatttatttagtagacgagaatgaaaaactgttcttgagtgctcgagttcttgaacttacgagatgctattctacgaatgaatacaaagctacattgggagactacctcattcaagatgggggagttagtcaatcgctcaaagagttagcagatcaattaaagcaagcaactacttatgtttggatccgttatgccgatgatgaggaagggaatggaatcagtgttttgccagccggaaaaacctatattgcgattaagcaagttctaggtgtcccaacagccagtgatgatccctcagattatcggggactctgggtaaaatttgtgggggaaggtgttcctggtccgccgggtgagaatggtcagccaacatacacatggctaaagtatgcagatgattatcaaggcactaatatgaccgatgatccaactggaaaatattatattggactagctacaaacaagctgaccgcaacagaatcgaacgatccaaaagactataaatggcagcttgtcaaaggcgaagatgggcaagatgcacatatttatcaagcttactcttggaacccagatggtaccgatcgatttacgattccatatccaaatgaaaatttgattgtccattcaactgaaataaaaaatacaaatattcatacgactggggcgccctatcctgatccgaatagtaatcttatgggagactatatttcggtaaagcccggagatgttttgtatttcacgcaaacagaagatccaagtgcaacatattgtttccgttggcgctgggcagataaagacaagaattatatagaacgcaaagcagaatctgggaagaaatcattttcttggaccgtcccaacaggtgcttactactttcaagcctcttatccaaatgtcggagacaataagattgaatttagcacatcgcctacaatttacaccccggctcctagcgatgattttatcaatgcatatccttcttatgtaggaacttacacaacatttgatgatgtccaatcaacaaatcctgctgactatacgtggcaacgaatgttaggtttatcaggtgaagatgggaaagatggggaacaaggcccacaaggggtaccaggcccaaaaggggacaacggccaaacttattacacttggttgaagtatgcagatacgccaacaagtggaatgtctgacagcccaactggaaagacctatatcggattggcatacaacaaaccaacagccaccgagtcaacaaactatgccgattacacttggtctttaattaaaggatcagatggtgctcaaggtcctaaaggagataatggtcaaacgctttatacgtggattaagtatgccacgtcagctaccggcgcaggaatgtctgatagtccaacaggcaagacttacattggattagcctacaacaaaacaactgctaatgaaagcaccaacgctgctgattactcctggtctttgattaaaggagataaaggtgatacagggccaactggacctcaaggaccacagggcccagcaggaccgaaaggcgatcgtggcattatgggcgttgcctatatgcaacctactcagcctagcgataccacagaaggagccacatggtttcaaactgaatcgtcaacaagtgataaaattattgcggtatacacatacaagagtggttggcaaaaaaagaaatatgctagtgcaacattagcagttgaatctctggatgcattgagtgctgatttaggcaaaatcactgctggaataataaacggagtagaaatccaaggagatggattgtattctgattacgattatcaaatagctgaaggaagtacggtttggcgaaaaggccggctttctatgtcaggcgggtacttccgaaatgacttccaaacgtatgtaaaaagtaccggggaaattcaaaataatggtttctcacaattcagccatgaagatcttcaatttgtcgtatttaacgggtcgcaaaaaacgaaagcggataggcatctttctataaatccttacagatttacaatgaccgatagccgggggctgggtggtaatctaacttttcaggatctatataatataggaaaaacaggaattcctgcagcaagcggttggtcccaatattcaacaagtccatcgagcggcaattttcctagcgcaaccagattaggacgtatggtccaagtgagtggagcctttaaaaataatagtacactaccaaatacaaacgatacttatgttgtaggtgtacttccggtaggatttagacctcaaatgcaagtaaagtatttaggtaaaggagctggaacgacaatattcatggtcactatcgatacgaatggtgaaatatcaattagctatcgattaggctggacgggaagtagcttcggatatttaacaaataatgcaaatgatattttcaatatagctggagtcttttcagcggcagacgtgtaggaggcagacgatgacagctaaagaaaaatataaagaattgtatatcaagcatgttattaaagaaaagagttcaaccacagaggaaatggatgagctcttttctattgttttagaagaattcgatgatgattcagaaaaaatgagcgaatttattcagtctattgtagctgaaaacaccgagagccaaccctcagagttagatttattgagacaagaaaacgaagagttgaaacaacggcaggaaatggcagaggaagcgctgctgactttgtcagatatgtattttagtagataaggaggataaaaatgaattattcagcattagaaatgttatatgcaacacacgtaattgaaggaaaacgtacaatcgaaagtgtgccagatattttacgagaagatgttgcaaaaattgttgacgaagcaaaaaagccagaaggaacaaaataatcggatatacagtatcaggggcgatcggctttctagccggttgctttttattttaagcgagaaggtgaagcatgttaaatgtgggagaattagcgacgtgggctggatggattatgacaattgttggaatgctagcatttgtcatcaaacctataatgtcaaactttacaaaaataacggaaaatctaacgaagctagggcataatcttgatcttctaacaaaagatttagagtcaagtaaatctgatcgagtagcaatacatgatgaattaaagaagcatgatgagcgcttagataagcatagcgaaaagttaatagagcatagtgaacaattaaaatctttatggaaagaaagaaggaaataatatgattctaaatgacaaaacatatcaaattatcaaatgggtggtattaacagttttgccagcgttgagtgtacttgttggcgtattaggtaaagcatatggttttgaacaaacagatattactgtattgactatcaatgctgtagctgtattctttggagctgtaacaggggttagccagtataactataataaagacagtcaaaaaccagatttgggtgatggacaggagttcactgaaaaaaaggagtagccaatcggctgctctttttctatatctaaaggaggaatatttatgacaatccaatcggtacacgcaggacatggcggaaagaaaaacggaaatgcatggacagatccaggagcggtaggcaatgggtataaagaagcggatgtagcacgtacaatcaccgatttaatggtcaagaaaactggtgctaagaacgttaccgataatacaagctcgacatcgaatggaattatcaacaatgtagcggcgaacatcaacaaatgtgctgacggttggcaaatttctaaccacttgaatgccttcaacggaaaagctacgggcgtggaagtcttatatggttcagcaagcaataaagcaacagcagctaaggtatctgccgcaattgccaaaacattaggtttagttgatcgtggcgtcaaagatggctcttggctaggaatcgcacgtaattcgggagccggaaagaaagttctcttgatcgaatggggatttattgacaataagaaagacatgcaagcactgatggctaaaatggagaaagctgttgatgctgcattggctgtattcggatatgccacaaactcatcaaataataacgcagctgcaaataagccttctacttctacaaccagtttcaaagtgggagacaaagtgaagattgttgatgcactttacaaagattgcacaggagctggacgttcgactgctagtcgtggtaaaacagggacaatcaagcgtgtagtcagcggaaacaagccgtacttgattgacagcttaggctgggcgcataaaaatgatattcagttggtcactaccagtaatgcgacacacaaagttggtgatactgtgaccgttcaaagcttcgcaacaaactaccaaactggacaaaagattccgaattgggttaaaggacagaagtacagaattaagcaagcgaaatctgttaatcaatcaaaatctaaaaaggcatatttgctcgacagtgtgaactcttggttccttgaacaagatgtaaagtaaaaaaatagcccgcaatcgcgggcttgtacatagaataaaaacgccattacgctatttgtttgatatttataaaaaagataaaaaaacaatttatttgtatttattagtgtgttataacttagttgtgaagttatttcagttggaaaggagtaaaaaaaagaaatatatgcttaagagtagtaaaaatataagttgttcagtgttttatttcttttgggacatgttcttcatttaaagttggtttatgaattggaggtcgattaaatgtatagaaaaataaagcgttcaatatttagtgtattgttaggactattattggtagtcggagtgaaagcatatgcatctgagactacagatgcaagtacaatatatgataatgctgtaaaagagaatattattgatccagcactctatcctaaaagtaattggcttgatgatgagaagaagtacatgcgaccaaactatgatttttttaaatccaatatacttgattctgtaagctataacgaatggttagaaatgaataactatggtgttatgagtgatacaaaattgcctttgctgcaaaataaaaattctaacagaagacaggctcggtctgcacaagacaatattaataaattttgtaaagatgctaaagctggtgatattttaatagttagtggcaattttccaaccggtgtgataggtcatgctgcgataatgaattctgataatacagtgcttgagatgagtggcggaaaaggatgggaaaaaggaattccagataataatcatcaatattcaaaaagaacatggattaaaaatcatattaaagattggacaagcatatatagaatatcagattctaaattagctaaaaaagttgcaaggtatgttgatacgcattatttctcttcaaaaggtactgcaacaaaagatatccatattgattataagattgattcacttctgaaaaataaaaatccaaattattgttcaaaattggtctatcaagctttttattacgggactggagacttgcctgtaatgaaaccaacaattccttggggagtaatacctcctgcaaatcttccaacaaccttttcgaatagttataaaccaacttatatagggagatattaactatgaaaaaaatggtaggaatagttccttttctattattgatttggctgcatttagcctatggtacctttagtaaaatgtctgtgtttcatcaatcttttatggccatatcaaattttatggatcgggttgtacaaaacaatcttgcgtcaacattaattctttttttaggaattcccgttttatcgatagttggttgttgttatagtctttataatgtgaagagtaactatcaaaaaatcatttttggtgttttggtactcgtatcaattattagctttggcttcttcctacttattacgttaatggggctagcaaatcaataacgcatagatagggaaataatggatcttcaactgaaataatgaagaccctcttactcagaatcgagtaggagggctttttggttgaaatgcaaacagatgtttggtatgattagagtgtgatcttcttataatcatatctgctgtggaagtcttagaaaacgcttgtttttgagacttccttttggtttaatttagatagcagataaaaaaataaggagaaaacaaatatggaaaacagagacgcaagagtaaatttttttagactgacccccggaagaaaaggtggtataaatgaatttagagaagtgttagaatcgacttttaaaaattttgaaaccaaaaaatggagcaaaatacctactttaaggatagacagtgatgattattatatacaagctatgcaaaaaagaactctcgaagaaaaatttcgtggagaatttgtttattattggttgataacaatttctcgggtaaattttgatcaagaaatcgtagtagcagatgtatctaaaacaattgatgagagaaggcgcgaaatagagcatgaagagaatgaaggaattgttgctgatactcaaataatttttgatcctttcagaaatatccttgcagtttatgccagaagaggtactataaatacctatgatttaagaagatttatatgtaaattagttgatgtcaaaggattacaatttgaaattatattaaataaagatggctataatagaatagaaaatcttgatatagtcgaccaaatttcatataaagtagcaagtccggataattttaaatcgtataaggatgatactagagacgagtttggtgattttaaatttgctaaacaattccagggagaagaactatttgttgtcttaaagtctaatcagttatcaaaacctagcattaagaaaaaggtaaaagatttaatgactgtcgataatattgaaattaaggcgttaaaagttgatggtattgcagacggagttacagatagtatcgatttaattaaaaacaaattatattactcaggaaagattttttttgaaaaggaaattgatgatcaggctgcttacggattattaaacaccgcatttgatgtccattatgattttctaaagacaaaatttaaaatatctcgcattgaaagtgaggaaatacacaatgaagaaaggaagaatgaagcgaaataaagttgtgcttatagttggaattgcagcaattttggcggggtgggtatttaaaattagtccttcaaaaattaacaattttactgacataatgtctgcttctctatctttttcggcgttggcaacagcaatgttcctatcaagtttttcgcttattccagctttttcaaattcaaagtttataaacgcattaaaagaattgggtacggatataaaaataatggacagattgttaatatctacattaattttttttatcagttcattgatgacttttatactgctttttttcgactgtaattctaactctttgatttccaatataataactacactttggctttcttttacatcaatgggatttgctagcacattttacgttattgcaatcttaattaaaggttttgagcattattatgagtcgcaagtcgaaaaaaatcatgaataaagtaaatataaaaagaccctagctcatgctaaggtcttttttcattgcttcgaagtcaatcataatcctcgtttttccaattaccgaatacttcttcacaacaaactgattacgatcgttatactcaccagcaactactatctgcattccttcgtctacgtcggctagaaaactcaaactatgtgcagcaatcagacagttcacaccgtcaagagagaaacgcactaaaggggtcctcgacattttcagcactcgtatcttcgaaactacacctttcaatgatttcatagtgatcgcctccatatttttgtatatagtaattaaagtcagttttccctaatgtcagtttgacataatactcaatgcattttgtaccaaaaaggcactcttgagattcggaaatgctgttcggaaactcttggataaattccgagtatgaaatatacttttgctcatactgactgattacattcatgagagatcaaaccatttcaattctccttgataaaattctacatttcgaatctcctcatattcaacgagagtagaatcaacgtaaattcctatttcattatgcccagaaaggcggcctacaatgtccggcatgaatttgtcattctgtgtatagttaagctggacagcaatctttttatttttcaaaagagcctcttgtaaaaattctccaatctcttcaatttccatttccggtttaggtggataagtgtaagctcgttcttcttcaactttatttacacttgttgtatgttccgataaaaagaaacctatccattttaattttttccggtcctcgtaaggtttaatcattcccataattatcactcctcacgaaaattatacgaacgtttgttcgttttgtaaagcgaacagatctttaaattgtaacgtgagaacgagtagaaaagatgagaatttttggtgatagttttggtgatagcgaaaagaaaatatcgaaatgatagaaaagaaaaattagaggggaaacgttgatataatggtatttttaaaatagagaaatactagaaaaagggtagaatgtataagaaaaacatgttcgcattgcttggcaaaccaggctttgaagagcttgcaaaagaattgaacgaacgtctataatttatcgttctaactaaaaagaaccagtcctccgatcattcttctgagggctgatttttcatttatataagcggatggttcagaataaggacgcttattcatttaaccataaaatgaccgtcacaatagggcattaatttgtggtctttaggaacagttaaccaatcaaggagtcatcaacgattttcctttaaaccaatcaataatgcgactgtcaagagaccaaaaatacatgtttggattactggcattctgctcatctcctttcctttatgttactaggactttctggaagatgcacgaacacaccagtcataagaagcgaacgattttgtcatcttgtctgcggaaataagtaggtgccaaatttatcataaaagcgcttgcataaatcggtatttttgttattatatttttagaaaagaagttctgaggtggtaagatgctagatattgaaattggaaatgcctatgtgtgtcaacctattggggcaaaaaaaacgctagtcggtgtaattgagaagctgtatgagcatacggctcttgtgaaagtgaccgattatgagatggaggatcaatccattgtattggagtgcaatcagcggatgttggtaaaatttgataagattaccgcagtggctgtggcttaataaaaacaagactggaactcgctaataaaaatgtattatgtcagcatgccgaaaagtcagcttgtaggcactgattcatctttattgactagagtccagtctttctttttagctggcgtgaattagccgacgccgatcacaaagttcagtagcttatctgagtaagtcatttcatcggtggactcactgagggtttggttcaaaatatccatccgatcggtaatgatgccgtccacaccgtagaactgcatccgactgatctcggcatcatcatttggagtccagacaaagacatctttatgatccgttttggcagatgaaacaaagttgcggttgatcgtactatattccatcgttaaaaaatcagcacttgttaatggagggccaacgatgttgaagggcatgatatacccagcagttagttccggagcctcttgtttcaattcttccactacattataggtcaagctttgtagaatatgttcatgttcggctagattttcacggtagcgttcaaggaatgaatggactaatgttgtcgtatcttttcgttgtgtcttgatttctactagcaatttctgattcaacgaattcgctaaggataaatagtcatcaaatgtagcaatcggagccgtttgtccattttcagagacggttaatttttgtgcttgtgccaaagttgattgctccggtttctgattgaagccagtcaacgctttaaatgaaaaatcgtgataaacaatgaaatgaccatcgctagtttgttgaacatccatttcaacgtaatcaggatggtagttctcactagtgaagcgcagtgcttctaatgaattttgaacgccttgaccattgctgacgccgcgatgcgagatcgtcaatggtcgagtattagcggcagaggtcagataattcatgttgtataaacttactcctaccccgaagaagacggctactacagtaatcaaagaggcttttagtcgttgaaaatttcttgctggcaatggttcttcactgaaccattgtggtatctcaggtaagaaaccttcatcgtccataaaatcaacaatgatatagaagatggcaacggtagacaaaatgatattcaacaacaaaacgagttgaaggagcgtcataatgaagactgctgaatacagcgcataatcagcgaaaagttcttcaatgatcgcttgcaggataatcaaaaaagtaaatcctactgttgaaatgaataagatcgcgccgccaataaagacaaattggccaacaatcgcaaagaaacggcgtttcgttgtctgcaaactttctcgaatggcctgtcgaaaaggaaggtcacgtaagatcatttctggtaaagcaaaaatcacacgaatccctagataaatcaaaagtaagtagccaagaaccacggctccgataatcaatacacgattcgtaaagatgaaatccatgataaaagcagggattttcactttagagagcaaatctgagttaaaacttagcccgccaattggcaaaatcaaaaagaaataaaacaagaaaaacaaaaaggtcatggggcgtaatttgcgaatttgtaaaaatgtcattcgcaacagctgtcgcaatcggaccggctgctttttcttgatgaaatagacactcagaagcaggaatgtaaactcaaaaaaaactgctaataaaatcaacaacaagattagagagagcgagaatagaaccattggatgctctgtaaaaatactacctatattgtcgaaagataaataggctaatcccccacgacgcaggataaattttgttgaagaagaaagcagtgggataaccaaaaaaagcaagaaaccatgcattagcagaacatctcgaaaataagcatcgcttgcctttagaaaatcccaagtgttgatcaaactattttttagatatttcatgttgttcatcctaactctagactataaaaaaccgaactatcgtgtttgattcctgtaatgaaaggaatgaccaccatctatagttcgggaatttcctgtatttatttttgctattaagcccggcacttagccgcctaatagccctgttaaaaacgtaccgccataaatcaatgccatactatataagaaaattgataatggttttgccaataaaatgatcaaagtgaatttcttgactgaaatattcgttagtccagccatcaaacacaaggcatcatccggggctaccggtaaaaagatagcaagtgcaaagagtttttcaaatcgactttggttatccaaccagccaatatatttatcatatgttttatcactgatcatactgaggatgaatggtttaccatatcttctgccaagcaagaagatgatcactgaaccaatactaatgccaacataattgtagacaaatccaagatatggtccaaaaatcaagacgccagccgcactggatatcccaccaggaatgatcggaattacaacttgtaaaatttgtagcagcatgaagatgattggtcccaaaataacagagttgcctaccaaaccacgcagtgcattaatatctttaaagacacctagattaatgaagtaaatcgttaaggcaatagatagccctaatcctataattgatatcgtattaatgatacgacgagaagtggcgatactcacagactttcatctcctttattcgtttctaattccactatacgtggtgtaattagaaaaatccagcaaaataaatgacattcgtcaaacaaatttgtaagatttgatacccttattataaaagaagaatagcaagaaggcattgtactaaagtctgaaataagaaaaatttagcaattcatgtacaaattatcacgagtgatcgataggcaagttgttttcatccttagttattgctttcattttttatatttatttcctagttgtctccactttatcaagtcgtgctcttcgtttgttttgccaacttgcgatggtcttttcaacgacactcgtcatcataaacccgcccgcgattgctcctgcagtgatcaaaacaatcatgaggttctctaatcccaaaaggttatctcccaaggcaaattcacgaacagctttataagccggaccaccggggaccaagggaactaaactaggaatattgaagatgatcatgggcattttcttgcgtcgtgaaaaaaagatgctgacacagccaaccgcaaaggcagcataaaaattggcactaccaatgccatgacccatttcatgcagctgccaataaatcatccatccaacagttccagcgatcccggttgcaatcaatgcacgtttcggtatatttgttaatatgccaaaggtgacggtacttaaaaaactaaaacagacatgaatcaaaatggtcatgataaccccccaaacaaggtgaagactgtagcgattcctacgccgattgcggctgcagtaaagatagcttcagttcctcgcgcagttccactgatcagatggccagctagaatatcacgaaatgaatttgtgatggccactccaggaactaacggcatcacggcaccaatgatcaggttgtcaacatttcccgccaaacccccgcgaacagataggatcgctaagcagccaatcactaaagaggcgacgaacatatcaaaaaagcggatatcaatcgcttttttcacccagagacctgtaatgaacccgatgctgccaatgaaaaaagtaacaatgaaatcagaccaattgccgccaaaaataatcattaatgtactgctgaccactccagcactcaatacttgtaaccagagaggaaagcttggtgtgacttgattgatctttttaagagatgcatacaactgcggtaatgtgatctgtttttctgcgaacgaccgggaaagccgattgacggccactattttctccaaattgatcacacgatcatgaacattttcaacttgagcgtagtgactgcttcgtaatcccataaagatgcctgtagcggtcacataactgatactattggcttcgccagcgttagcagcgatacgattcatggtatcttcgactcgataaacttcggaaccattctccatcatgatttttcctgccaagaggcaagtttctaacaataactcatttgtttcttgcattttaacgcctctctatcttgaaaagtaatcctcctattagtttacctttttcattccaattcaacaagagaagtatccggtgagttaaataactaataataaagaaaatatcttattttttgaaagcaaccattttatttaaattggtaaaaaaacttcacaaatagcggtgtggatataattgtagaacaattcagacagttataagataacgaaatgagtatattgtttttcaatttggaaaatctcggttacaattagataaaggaaaagggggatttattgatgcgaagaaaggtctatacaagagaacatattttgaaggccgcgtatgagttgatcaataaagaaggatttggcaactttaccgcccgaaatatagcaaagcaaatggggatttcaacacaaccgatttatttggaatttgaaaacatgcaggatttgaaaaacactttagttgaagcggtcttcaaagatctttcagaaaacgtgtttcctgttgaacggactggtgataaagtcattgatttaggattaaactacattcacttcgcacaagaaaaacacaacttgtatattgctcttttcgtagatgactatggcggagggaaattgatgcacgatttttcgtctgattatttcaaaaaattgatcaagtccgaaccaaagtatgcggatctatcggaagaagcgattacagccttgcacaatggtgcttggatcgttgttaccggcattgcttcattgatgtcagctggaatcattacgccaacggaggaacaaatcattaaggtgatcgaggaaacgatcactgggattttagatagaacagacatttttatttttcaataataacgaatctgcaaccattttttcggatggattgcagattttttcttgactttttctgaaaaaagtagaaaataaacgttatggagagttggcagagtggtaatgcagcggactcgaaatccgccgacccggttcatcccggcgcgcaggttcaaatcctgtactctccttaaaacaatttatacgagtatcagaatcgctttcctaccaagggatagagcggttttgatactctttttttgttttgtgacccacatactgacccacatttaaatattttccattactttcgagaagatatctggtacctttttttccatttgttcagttacatgagaataaagatctagggtgatttgaatagaagaatgacccaatctttccgaaatagttttcggttcgacaccagcttctaatagaagagttgcatgagtgtgcctaaaaccatgtatcgtgatttctcgcaaactatttttattaatcgtttgtagcatccatgttcttggttttgacaactgaataaaactattatcggtgcttgaaaaaactaattgattcgattcattgattttatggccaaattgtagtaaatactctttttgtctcttttgccaatgttttaaaataacaatagtgttttcatcaaggctgacagatctttttgagtgtcttgttttaggttgctccagatacaagcgcttattctttcctctggccagcgtttgattaatatagatacatttgtttacgaagtcaaccgaacgccattccagccccaataattcgccttgacggcatcctgaagcagaaaggagcgtgaagaaagtataaatgtaaaaaggttgctgattctttgagcaatctaaaaattcttttaactccgcagcagtgtagtagttgatacgcttttcttgactaacagaatcttttctcttaggtatcgtaattcttttagctggattttctttaacgataccaatgcttattgcatactcaaaaattcttgatatgtcagtgataaagtcgcggtatttaacgaatttttttaccttctcattcgcaaatttttgtatatcaagaaccgtgatttcatcaatctttttatcaccaaaaacaggaataacatgtacttcgtactgagaaatagccttcacgaatgtactttctttcactgttaactcatagttttccttccatattaaaaatacatcaagaaacgttttactttgctcaactggttttccaaattccccgttttcaaattgaagctgcaacctattcaaagccaactttgcttcttttttagattgaaatcctcttctggttgtttctattctcttacctgttttcgaatcaataccaagataagctttaaacataaatctagtgccttgttttgtatcatattgcttaaatgttgccattgttttccctccgtagctgcgcgtggggcgttggtggggggggattatattaagattaatctaaagcataaaaatctaaataaaccaatctttcgatattttcgtgcttatccataaatgtcattggaaagtaatcaacatttttcggtgtataacgttctttttcagacaaattaaaataatcagcatcttttattctagggagtatttttgatatttgattttttaaattgtagcgatcagacaaaaatgaagctataaaatctataaaagcatcgtcagcaatcacttcgcttaaatcgttgttaaaatcaaaaaaagatgtatcgggaaaatatttttctatccatttttttttgccctttaaagataaaattgcgaatgaatttgaattaaagacaagcttgcctttatattccattgctttattctccagtaagcttgtgagggtttcaaattctgtatctaattgtaaattactgattttattatctgacgaagatgaaatgatggaatcaattctatcaaaaacttgtatattttcttcataaaataaatcatcgagttcatatctcactctcacaaatatggagtaagtacggttttttggtccgatagtattaataataaaagtgtcagtaaattctttttcaattacagaaaattctggaggcgtatgataaacacctaacttttcaaatgtttttaacttgtgggcatcatcgaaagaaatcattctagaaagaggtatgtccaacgtttctgcaatcttttctaaagtttcaattctggtttttgatggtacggtttcgcttttactcaggggatcaagagtggttctagaaagaccggtcaaattatgtaatttgttaaccgaaagattcctttgttcaagtatttcttttaagtatagtttcaaagcaagtcctcctattgcattttataaaaacaatatcattttgttgttgcattgtaaatgattaaatgatatattgctcatatagagttcaattatttttttatttgcactctataaaatcaacaaggaggatgttcatgaaagcaaatcaagaaattagagattcaatctattccaatcggttaaaaaactgggaagtatctgaaaaagtaggaatttccgacagtcgtttttctgtatggttaagaactccgttaaacgatgaacgtaaggatagagtggaaaaagctattgaatctttagtaaaggaaagaggtaaataatatggaattaaaaattgattctattgaattggctgacccagctttccagccaattgttgaaagaattgctcaagcaattcagaaagctagcgaaacggaaactaaaagaaaggagttaccacgttatatgaccaaagcacaagctgcggagtattgcggttgtagctttaatacttttcaaaagtatgtacgtgcaggacttagagtcattcaagttgatggtgtgactcgaattgataaaaatgatgttgatgaatttttagaacagaacaaaaaataatcgcaagcgcgtggggcgttgaaggttaggaatatgtttctaagtcaagtgtagtcgcaaatggtttgatataggaggaataacaatgggaatcacacaaaatcaagcaatcgaaaaagttttacgagaagtcatttcaaaggaagcagcaaaagagttggcaaatatcgatggccaaactttgacagaagtctataacgctatgaatgagcagatggaatatcaagaattgatgcctgtagcaccgaccgctacaagccttctaagagaattgtacgaattgacgcaagcgaagttcgataatgattttgagattggggatcttcagtatcaagtatatgcaattgttgaaacgctggcagacttgttaggaattgatttggaatgaagttgatatctatttagtggtttgcaagctaaattcgtgcatcaaatgcacaaatagattcgttcaattaatgaacgaattggcatttgtccattaaatggaagaatcaattcaatgtgtttcgaatatatggaggtgggtcaatgaacgaattagtatttttggaatcggacaacatgaacgaagaaccttttacaacaagtagaattattgcggatcatgcagaagtcgctcatcattctgtaactcggttaatcagagactatggaaaagatttagaagaattcggaattattggatttgaaatccataaattagacggtagaggtagaccaagaaaaatctatcgcttaaatgaggaacaagcaacactgctcataacgtacttagataataccgaaccagtaagagcattcaaaaaagagttagtgaaacaattcttcgctatgaagcacgaacaattatctcggcaggctttacgaagtgctggtaagcaagttcgcgtatctatgactgatgccataaaaaaagcggatttatcgcctcatttctacaaacattatacaaatctatgctacaagtcagctatagggtttaatgcaacacaaatcaagaaagcgcggaatgtagctagaaactcgtcgctaatggactacctttcaaaagaagaactggaagcaattaatgagagagaaagtcaaattgcaactatggttacactaggcatgtcatacgatcagattaaagttgttcttgaaaacaatggtgtgatttatcaaacaacgctcaaaatgcctgtaagtgaaaaagaagcggtttaaataaaggatggtgattgagatggagcgattccacgagttgaaaagagaagtcatcgcaaagctgctatctattcaagatggcgatgcgttggaaagttactcagataatatgatcgaagatatcactaacaaagaaaccttcgaccaggcttttgaattaatgctacaagctaaggaaattgccgaaagagaggtttaaataatgattggagaaaagaaaaaagcccatgctgtacaattctttggcgagaatcagcaaaaggcaacacaataggtttatttacctatattcttttctccattataacagattcgaaaaaaaatcaaagaaaaatggagtgaagacgatgaaaaacagaagaattacattattggttactatttttatgattggcgcagctgtttctccgctagtaaaactgctgatcattgcaccttgtttagtcaatctattcatgcagtatgacgagtacgactacaagatgaacttcggaggtgttgagtgatggcatttggaaatttcaattcagaagtcttgaacgctatagatggattccaattaggagaaattgaatcggggatcaatgagctagaaagttgcttaggcaaaaccttgctaggtgaacacttcaatgaaaaattagaaatattatacgtgctgaaaaggcatgctgagcatagattgattactagagaaattcatgaattaaaagaagctatcctcaaagaatggctgcttagaacgagtttaagcgaagcacgaatgagaacttttaatacatgggcgaagtatcaaaaccaattaaaaggagctaaattcgtctgcgaggggctaaaggatgaactcgagcaattacaactaatggaggtagccaaatgaaggataaaaatttgttagtctgttcgcaaaatcttgcatcaagagtaaatgatttgaaaattattgagcgtcttatcgagaatatcgaatattcacgagtaactgaagatacattttctttaaacaaacaattgggaactggagtgcttgacgaaataggtgaggccttagaaagtatccgagggcaaatacaagctgtctctgatgcgctctatccacacaaggagggcgcaaatgaagtatgaaaatgtctatacagtagcggaagaaaactcacaccgattctatcaattgcccaaagagctttttattaatgaatcctataaaggcttatccataagtgcaaaaatgatttactcgttcttgctagatagaaaggaattatcaagaacgaataattggattgacgaatatgggcaagttttcttgctatttactaggaagcatgtaggagaaatgcttaatttgtcagacaagccagtgacgaacgcatttaaagagttgatcaaggctgatttgatcaaggaagaacgacaagggttgaataaacctaacaagatatatgtatgtaagataaattacggaatcggagaatctccgattcaagagtcggaatatatccgacctaatgatactgagattaataatactgaaaaaaacaataactcgagcagtcgagaaaactctttttctgagaaaaaagagcccacgattacttatttcattcatgattataagtcgctactaaatggacttgatgtcttagatgatgaagcagaacgggtcatcaatataattgttggatattctgaaaaatatcgtgatacactacaaagttttcatccgaggataagcaaagaacaactttctaaaatcgaaagcatgatcagatatatggattatttagaaacatgggattggagagaattaatcgatcgatattttgaagaggaaaactatggtgatggaaatattaatagattcttttctggcaccgaggaaatgggggtaatagcaggaatgatactttagaaaggggtgtatagtacattgtccagacaatattaagacaatgtccagacaagtaactcagaaaaatcattattcaataataaaagaaatgaatggagtgaactttatgagaactaacaagagggaaagagcgtatccaattttactagcttatgaaaaaggatcacaatatgcagtttggtgtccatattgttttaaatggcattttcatggaaaaaaagatgggcatagggtggcccattgcactaacccacattcaccgtttaaaaaaactggttatattatcaagctggccacaagaaacgatctagatttcaaaagtcacaatctctatccaaatgactatccaatgtttgaggaaaattaaaaaatgagcggaggcatgtaatggaagaacttacgattattgaacaatcggtttagaaagacattttgtccaaaaatcaatgaaggttgctaaacaattagcaaatttccaaacgttgggaaatttgagtaacgaagccttatacctagtagccactcttccagaagaagaacgcacacaagaacaaattcatgaaagttgtatctgaactagatgggaaatatgactcaagtcacaatttaggttttcaaaatttatatgctattgccacactaccagaagaagagcgaacaacaggcttgaaagcttttaagaaccagtacaaaagcatggaacaaacaatcacgaatattgaacaagcagatctaaaaaattgggaacaaacaataaaaattgctaactaaggagatggaacgatgaacacagataaagtatatattgacaaaccaacgaaaacggtagaacttacactaccagaatatggcgaagttatcctggtcataaaagatggccaagtagtcagatatgagacgaaaaccacaaaaaaattagattgaaaaaagtgtgttaaaagctgatatatcaacgtttgataaagattttatcgctcaaatatggtataataaagacaacttaataataatatctgattaggaagaaccaacggatatgagacgaaaaaagccagtaatatggcagacgtcttgtgtccgttttttattattagttgtcctttgaaaactgtatactgcggttgctgaaaaagccgtcctagatgatgacaatcccaagctagaccaacgatcaaagccgcaacataatagaatactgttttttaggagggaagcatggatagtgaatacaatttaaaccgatatttgaacatagaggcttatatcagaaagctggaacaagaaaaacgattaatcaggcaagaactttattgccaaagcctatgcacaggaattgcctatgatgaaattgctatccatgcaaaagctcccaagattgattatttagtagcagataacgtcgaagcgtgtatgctcattgacaagcggatagagcgttggaagtttaggcataagcattttatgtacttcttaaatgaattgcctataactgaacgtgagagccttttaaaaggggttgaaagcccatctttgaaacagaaagcactcgatgaaatatacgagatagaaacagctatggcgttcagatatgaatgggaagtgccgcaagaaagggttgaactaacagacgatttgttttcgaatattgcactaatggcggaggtgtttggatagtggtttatgattatgacattcgcccaaaatggatactcactcaatggaaggcctttgtggtaaatagaaatcatttaaaagaggggaatacagcaggatatgctcgtttgctatttactgctttaaaagagctgccaaaagaagatgttttaattctttctgagaagtattacgaaactgaacaaggtgccaactttagttatatgcataacggttatcgaacttatatacctataacagataaagtattggctgaccgaagaggaatatctgttcttgaatatcgaaaaatcaggagcaagtcagaggcgaaactacaggctagtatcaatcggctgagaaaagagtttatcgaaattgatgctgacgaactagaggaatacattctaggcgttgggactatttatttgaaggactacaaaatcattagcggcaatcgcgcggatccagattcttatatcttcacgcaagataggtccaaagcgaaaagattcaaacaggactctacacagggtcgccagctaaagatgtaccttcgattaaagaaaatggaacctcgagacgagtatataaaatttattgatatatggtttgactgattaagcagaaaggaaagtgtaaatgactattgtagagattatgaagacacgcaaaatcaaacagaagcatttgtgcgaagtcacagggctaagtcctgaacaagtggagaatgctctaaatgaggatcgggatggactgttatctgataagaagaagttggttttgcttaaaggcatttgtaccgctgagtttaaacgcaaagcaatgctcaccttggtagcaaagaacacaaatgggttagatcctgatactcgtaagaaagtagaggagttggcaaatgaaaacagaagatgatttctttagctatagagaatggaagaaatacctggaagaacaacaaatgaagcaagagctggaagaaaatccagatgcaattaaaaagctatcgctggctgaattaaataagttgatcgaggaagacagtacaaatgaaattgccattgagcgccgcagagagttgttggctcaatataagaaagaacgagtaacacagatcaaagaacctaagaaaacagtagtaagtaaactcaaagaaaaaatcaaaggagcgaatcaagcatgacagtagagtacacagtaaccacaccagaggtaaaagaattaaaagagatcgatatcaatatcaatgagttggagaaagagctagatagtctggttgaaaagagagacaagaaagcttcagcaaaaggtaagtatagcctagaaacattcaaggctaacaaagaagcgaataaggatattgaggatcttgagaaggtgattgccgaggcgtaccaagagcgtggagagattaccaatagtatctatctgaattatatcaatcagttgaaaaatgaaacaaaccgaaaagaagcagcgctattgtctgaagcaaaagaactatttgacaacaaaggattcgctgaagtaactgctttactgggaacagaaactactagactgttccaattaaatgatcagttaatcaaatcgcataacagctcaatgaaacaacttatagatgtattgggcattaagaacaaaaacatattggagagagttcaacgagaatactacaaaggaggatggggctacgcctcagtgttgggttcttatttccatgatgttaaacgatcagtgagtaactacttagatgaaatcattagactgaatggcatgccagataataaatttgaaattaaaaaataaattaaatgattaacggtgtgggattgatttatccccccgttatttttataaaaaataaattggttaggaatcggggatggaactccgaaaaacacacaggaccatacacgggaggggggcaaacattgaaaaagaatgcaaaagaagcaagaatagcggctgagaaagaaagactaacaacattgatggacggagtacctagtagtagcgctgaagtagtcaaaggtttgattgagcgagtttcatttatgaatgttactttgtcagaacttgaagaagatatcaataaaaatgggtctattgaacttttcaagaatggcagccaagaattttacaaagaatcggcttcagtcaagacatataacacgatgatcaatagatatactgccgcagttaaagaattgcttagattggtagtcgagaatgataaaacaaaagtaggaagtccagaagtagatgaatttatgaactttctaacaaccagagaatgatcgggggataaaaaatggatagattagaatttttgcgagataaggcggataacatttggtatcaacatacagtaaaaacagacttaggaaactcttttgagacaatttccaattttaaagaattgcttcggaagttaaaagcgatcgagcgagatttaaggctgatccagaagaagaacagttctaatcgagagtatattaaaagctatttttctttgctttctaaaagaatggaaatttgtgagttcctaataaatgaatttcaagatagagatgaagtagatggtgtgaaatacgataaattaatgcaagaaatgaagaataggcaagacgaatttcttgcgatcagaagacagaaaatgcaaaggagatgagagtaaaatatggcaggaagtgtaagagaaaccgatgttgtcttgaatttcaagacaaatggagaagtcaattactctaaaacgatcaaggggatcaatcgtgaaatgaacttagcagtaactgaattcaacaatcagatgtctgctatggataaaaatgcgactgcaactgagaagttgacagttaccaaaaagaaattggaaacccagttgacgcttgctgaaaagcgtactcaacttttgcgggaacaatatgaaaaatcagtagaagaaactggcaagtattcggcagaatctgaaaaactttataagaagatgcttgaatctgaaacgggtcaaaacaaattaaaagccgccttggatgaaacgaatgaagcactaaaaaaacaaggcgatgtatctattgatacagccaaaaagttacaaaaaattgaagaagctggcgaaaaggttgcgggcgttggcaagaaaatgactgtaggcgttacagcgccgattatggcagttggagcagctggtttagccgcattttcagaagttgatgaagctatggacactattatacaaaagacaggtgcaacaggtgatgttgctgatcgtttgtctacctcatttgaaaatgttggctcaaacactcacttagaactacaaacagtcggagaagcgattggtgaagtgaatactcaatttggattcatggacaaaaaacttgaagattcaacagactacctattgaaatatgccgatatcaataatactgatgtctcgcaagcagcaatttatgctagacaatcaatcgaagcttatgaactatcctacgatgatttaaacgatgtattggatgttactaccaaaacttcccagaacacaggccaatcagttgatgaccttatgaagaaggcgattgatggtgcacctcaaatcaaacaattaggattgagtttcgatgaaggggtgaccttaattggtaaatttgagcaagctggggttgactcaagcacaatgttaagcaagatgtctaaagcttcagttgtttatgccaaagacaacctatcgctccaagacggattaaagggaacaatcgattcaatattgaatgcaaaagacgaaacagaagctttgagaattgctaatgaagtatttggaaaagggtcagataaaatggttgatgcaatcaaacgaggaacgttcaccttggatgatttagcaaaagtagcaaaagaaagtggcggtgcagtggctgatacatttgcagaaacggaagatcctattgacgcggctaatcgtgcgatgaataatgcgaagtttgctttagcagacgtcggcgaatccgtccaaataagcttattgcctttctttgaaatggcgatcgatgctttgaagagttttaaaggttggtgggattctctagatcaaggtactaaaaactggattattacactcgctggtatagctgcagtaatcggaccagctttggttgtcattggaacgcttatgagttccgttactaagattacagctggggttaaagatctggccactgtgtggagtgggctaggcaaattattcggattgtctggtggttggtttgccgtagctgtaatagcaatagccgcattagtcgctgggctagtttgggcttataacaatgttgaatggtttaggaacggtgtgaatgcattcttccaaggtgtttctgatatagcggtagaagtatttaattttatgggcggatacattagcaatatttttggaggaatcatacaaaatttccaaaactttttcgatgctggcaagagaatttttaccggatttatagattttataactggaattttcactggagattgggaacgagcgtggaatggtgttgtaaatatttttggcggtatttttgatatgattgctgctatggctaaagcaccactaaacacaatgattggattgatcaatgcatttcttggtggactaaacaacattaaaattccaaaatgggttcctggcgtaggcggcaaaagctttagcatttccactttgccttatttggcagatggcggacatgtattaaatggacaagcaattgtcggtgaagctggaccagaattactttcaaacaaaaatggtaaaacgactgttactccgttatcagatgaagaaaaacgcaaaggcattggcggcaaagtacagccttctaaagtggaacaacatatccacattggcaatgtcgatgcgaataacccaagcgaattaaataaaatgaaccgtaaattttaccgtgcaagcaaacaggcacttgccggtgtgggaggataaatacaaggcacctagcttatcggctgggtgtcttttttgttatgcttgaaacactaagaggaaaaggagcggttatttaccattaccgaatgacataacctcttttactgttcgctcagctacctcctttctataaaaattacatttggaagtcataaaacatattgaaatcagaaggcgtattgtaaacaacttttgtactacatataatcatccatacatgttataattatataaaaatttgagaaaggagaattccgatgagtacaaggatatctgttaatagaagtgtacttgagtgggcagtaaggcagtcagggaagactattcaagaggtacaaataaagtttcctaagtttgatgactggctaaaaaaagaagtttcacctacttataatcaattagtaactttcagctcttttactaaaattccttttggttatctcgtgttacaggacgttcctgaggaaacattgccgttgttagaatttagaacggttgacacagaggaaatacagaatcctagtagagagctaattgacactatcaaggacatggagaaaaaacaaaactggatgcgagaatatatgatagacgaaaattactcttctaataatttgataggagcattggaattttccgagagtctaaattttgcagatgtagctaatttcattcgagaaagttatggaataccaacagcatggtacaataatgttaatagtaaaataaattcttttgattatttaaaagataagattagtactaaaggtgttttagtaatgcaaaacggcacggctttaggaaatacacacagatcgcttgatccatctgaatttcgtgccttcgctctaatcgatacttatgcaccgctgatttttatcaatacgaaggatacgctgagcggcaaagttttttctatacttcatgaattagtccatttaactattggggagaattcgctttataataaacaattttacaatggaaataaattcaaaaataatttagagattttttgtaactctgtggcagctgaattggttgttcccgaaagtacatttaatcaggagtgggaaagatttaaggagaaagacgttttattaaaaatagaacgcttagcaactttctataaaatcagtacagttgttattgctaggaaagctttagaaaaaaaatttataagtaaagagatatataaaaaggtaagtgatgaagctaaaaagaatgctttaattaatagcaataaaccacccaagactggtggtaatcctgtttatacggctcaatctagactagataaaaaattcatctatgctctatccaatggtttagacaagggatttgcagttcatacagatatttataagttaacaggtttgaatagaaacgtatttaacaaagttgagcaaaatattatcagagggggtgtgtaaatggaaaatgtttcagatacctttttaattgattcaaatgcatttatcaccccacatagaaattattatcaattttcttttgcccctactttttgggaacttcttaataagcactgttcaaccggagagataatgactttagatatggttatggatgaactgtgtaaagaagaagacgacgagaaaaaagatgagatgcagatttggttagaaaattctttcaaagggaagcatgcttctgcaaaaactcaagaggtagtgaacaattatgcgaatgtaattaatcatctgcatagtgataataagtatttagaggacgcagtgcgggaatggtcagatataaaggttgccgacccttggcttatcgctgttgcaaaaacatacggctatactattgtttcttttgaaaagcgtatgcaaataagttcaggtagcccaacaaagcgtgctaaaattccaaatatttgtgatgattttgggataaaatattgcgatttgttcgaaatgatgaaggcgttaaattttaaaatgtaaataaagattgctaaatttttgtatgattaatatttattaggtgtttgtggtctgtgaaaaggtatgttagtagaacaacagagcaaacgctggaataacagataaacatatttactctcaactataagatatccatattttatatggaatgatcgctttaaagatttaaaaacaatatatatagtctcagtaattttgattaatatttcgccccacgcgcaatgagaattattgacccacataatgacccacaaacacttaacacattttaaaatacaatgaaatggtttggcgtttctatgtggttttgcaaatatattaagagtggataaagccctatgacaagcatttataatccctgtactctccttacagtaacgctttgaagcgtttggcctatccttggtgataggctttttttgttttgtaagtaaagacatggggaggaggggcccgaggtatgagaaaagcatcgtacacgactcataaaatttaattaatgagttgattagttgattcaggcaagcagtgagagcttaggaaacgagttttgataatgtcatgccattgcttctttttttgaacgaaatcgattaaactagaagaaagagaacaagaaagcagaaggtgataaaatggctgagtttgaaaaagattatgtcatgcgccaaacgaaattagctgttaagggactatccgtttttttgaaggatgaatcagtagatgagatcatgcagttggatgaacagcagagtggacaaaagaaagagccagaagaggaaaagcagttggagtagctgtttaatttcataacaaaacaagaaagcacctgctattagtcctagcgaggtgctttcagtacgaatcggtatccttcatttggatgaactccttatgcagttttagtcaattcttgtacagcttgttcgatcgtcacaccagttgcaaaacggttagcatcttttttatcaaaaacgataaaaaggttcagttttgtatctagagtaactcgatattgtagttctgtgttatagaatgtcatagtcattctcctttcagtgttattcgtaacgaaaggcaacggttaagttgataacgaaattccatgatcagaataacacgttgcttggcgtctgtccaataataactgaatggtagaggaagtttactaaaaatttattaaggagaacagaagttatctaaaaaaatcaaataacaaatttgtaaggaagctcctctagtgtctgagtaaaaagcggtatgaagcggttttgcttgaaaaactctttttgttgggttaaatatttaatttattatattttttttaaatttaattttactcaatttatggtaagataagatttgtttcaggggaaatgaaaaaggaaaatgaaaatggatgtgaaaatatgtgcggaattgtaggtttcgttaatactaaagaccaaaaagccgaaatcattgaacagatgatggatcgaatcattcatcgcggtcctaatagttctggaaaattcattgatgaccaagttgctcttggctttcggcgtttatcgattattgacttagaaggcggtacgcagcctatttataatgaagatggaacgaaagtaatcatttttaatggtgaaatctataactttcaatctttaagagaagaattgatccaagctggacatgtctttacgactcatgcagatactgaggttcttcttcatgggtatgaagaatggggaactgatttattgcaaagagttcgcggcatgtttgcttttgccatttgggatcgcgaaaagcaagaactctttggggcaagagatcatttcggaatcaaaccttattattacgcggaaatgaatggtacattcatgtttggttcagaaatcaagagttttttaccacatccagattttgaaaaagaattgaataaggatgccttaaaaccctatttgacttttcaatattcgccactaaatggcgagactttctttaaaggcgtttatcgcttacaagaaggtcactattttacttataaaaatggcgtcatggacattcatgaatattgggatgcagactacagtcataaagaaaactatagcaaagaagattgggtccaaaaaatcgatgataccgttcaagaatcgattgctgcacacaaaatcagtgatgtagaagtagggtcatttttatcaagcggtgtcgactcaagttatgttgccgctgttctgcgtccagatcattctttctcaattggattcgatgacaagacctataatgaagcaattgaagctagaaaattgaccaagatgctgggattgaacaatacagcagcggtgattgatggcgagatgtccttcaatgcttttccactgatccagtatcatttggatgagcccgactccaatccgagttgtgtcccgctctactttttagctaatctcgcctcgcaacatgttcgtgttgtacaatctggtgaaggcgcagatgaattatttgccggctatgctgcttatggttggcatacgaactccaagatgattcgtgtatttgctcaaggattgaaaaaattacctaagaatattcgattcaaattaggccggacaattggtaatatgagaaacttccatggacgaattcatctctatgaagccaccgcacctgcaaaagatttctttatcgggcaagcactggtctttgaagagcaagaagccactgagatattgcatccagactatactagtggtccatcagtggcggaaatcgtcgcaccatactatgaaaaagtcaaagatcttgatgaagaagtcaacaaaatgcagtatttggatgttcatcaatggatgcccaaagacatcttattaaaagcagataagatgtcaatggctagttctttggaattacgggtgccattacttgatattgaagtcatgaaagtagcacagacgattccgacaaaatatttgatcaatcagtacaatacgaaagatgtctttcgtcaagcagcaaatcgtcacctcccaacagaatgggccaatcgggaaaaattaggttttccggtccctattcgagcatggctgaaagaagggactggttacaaaaccgtcaaagaactatttacagcggattttgctgcagaattctttgaccaagaaaagattttgcaattattggctgatcatcgcgccggtaaacaaggacttcaacggaaaatctggacgatctacactttcttgacctggtataaagtattcttcattgatgaaaaaattcctaaggcagaaacaatcatttacgaaacaatttaaaaacacgaggacagatgtagtccctctaaagtccattttcatacagactttggagaggagagacatcgaatcctcgtgtttctttttgtctttttatagggctaataaattttccaagtagtcagctaagccgtcctcggcattggttttatccgttacatcattggcaatagattttaattgtgcggttccatttgccatagccacaccccagccggcatattccaacatttctagatcattgtgttcatcgccaaaggcaataatatttttgggatcaatcttcagataatcggaaatcactgatagacctaatgctttatggaccccttttggaacaatctccaaaattgcatgaggaccgccccatgtacggacatcaaccgtgtcattgaattgatcgttgattcgtagagcaacagactcagcgaattcattttgtgttttgaccaataatgaagtcggatcagatttcatgttcttcaataagttttcttcagtaatactatcggaagaaaagaaacgctgatcaaagccttcaagttgatcgataaaaaaggtttcccgattttctgcagcaacaaaatctaagttcaggttctctttttgagccattagttcaaaagcgatttcttttgacacagagaattctgtttcatttgcccatacttgacgaggtttgtgtaccaaacctccattaaaattgatcataggtgtttttagggctaattgacgataaaactgatcactcattcgaaaaggacgaccggttgcgatggtcacataatgtccagctttcgttgctcgtgtcaaaacatcaaatgtccgctttgaaatttgggactctgtatttaaagtagtgccgtctagatcgatggcaattagttttttgttcactcgactcgctccattctctttttctagttgtttaagtgtaacacattttactgatttcacaagagatgaaagggggatggtaagtttctggaaaaaatcagcttcttgataaaacacgaacgttcggataaaatatttggtttttgttaatttttttattgtagaatagggggaattcgcctataatttgtaattgttcgatggaaagtgcaattattcttttcagaaacactaactaatcttgtaggagtgaacgatttacatggaaaagtttttcaaattaaaagaaaataaaacaactgtttcaacagaagtgatggctggggtaaccaccttctttgcaatgagctacattctttttgttaatccttcgattctttccgcatctggtatgccttttcaagcagtctttctggcaaccatcattgcctctgtcattggaacgctggtcatgggactctttgcaaacgtaccgtatgcgcaagcaccaggaatgggattgaatgccttctttacctttacagttgtctttgggttaggttattcttggcaacaagcattagctatggtctttatctgtggtgtgatcaatattttgatcacgatcactaaaattcgtaaattgattattcatgccattccagagagcatgcaacatgccatcggtggtgggattgggatcttcgttgcttacgttgggttgaaaaatgccaatctattaagtttcagcgcggatactgcagcagttactggatcaactgttgatggtgatacgattgttagtgcttcatttaatggaggcatcgtgccggcactcgctaactttaataatgcaccagttatcttggcaatcattggcttggttttaacaacgttattagtggttaaaaacgtccgaggagcaattattatcggtatcttagggacaacgatcattggtattttgatgggtgtggtcgatttaagcacgattgattggcaaggaaactctttgggaagttcaattaatgaacttggaacaacttttggcgctgcgtttggcccagagggaatgggttcattgtttagtgattctgctaaaattcctcaagtgatcatgacgattattgcctttagtctttcagatacatttgatactatcggcacatttattggaacagggcgccgtactggaatcttttctcaaaaagacgaagaagcgttggaagatagtaaagggttcaatacaaagatggacaaagccctttttgccgatgcaattgcaacttcgatcggtgcgatctttggaacatctaataccactacttatgttgaatcagctgccgggatcggtgctgggggacgaacaggattgacttcagtggtagtagcagctttgtttgccattagtagtttcttttcaccattgatttccgtggtccctgctcaagcaacagcgccggcattgattttagtcggtgtgatgatgctcgcttcatttgcggatatcaattggtcggatcttgaagaagcagttccagcattctttgcttcgatctttatgggactttgttacagcatttcttatggaatcgcagctggttttatcttttacgcaatcgttaaagtcgtaaaaggaaaattccgcgaagtatctccaattttgtgggtcgtaaatattctctttattttgaacttcattattttagctgtgatcagctagtaccaatcaataaagagcactgatttctggtcgtgcttttgacaatgaactatccaaactataacggattctttctttggtcgatgagctgctttatgtgggctgtaaagaacaaagaaggcgaaatcggttgtagtggggatagttttattttgtagacagatcacacaatcttctgtcttttttaattttactattttaaaaaatgcggtatagtttaagagaaagagggttttgacatgaaaattgattggaaacgaaatctcctaatttcttggattggctgtttttttactggtgcaagttttagtttagttatgccgtttattccgctatatattgaagagttgggggcgccaaaaagccaaatcgagctgttttcaggtctggcaatctcagtgactgcgtttgcagctgcaatcattgcaccggtttggggaaatttagcagatcagaaaggtcgcagattgatgatgattcgggcggctgctggtatgacagtcaccatgggctcattagcctttgtaccgaatgtctactggctattgattatgcgcttctttacggggatcctttcgggttatattccaaatgcgacagcattgattgcttctcaagccccgaaagaaaagagtggctgggcactaggaacattagcaaccggagctatcgccggaaacttgatcgggccttctatgggtggtgctttagcacagtggtttggtatgaagaatgtatttatcatcacaggggtcgttcttttgatcacattgctgctaacgatctttttggttcaagaagatttcgcacctgttgaaaaaggggaccttctatctgtcaaagaaatttttggacaaatcaaaaacctacaactattgattggcttatttattacttcattgatcctgcaacttggtgtaacaagtatcagtccaattttgactttatatatccgtgatctaagcggcaatacaggaaaccttttatttgtcagcgggttgatcgtatcgattgccggtgtttcagctattatttcttcgccaatattaggtaaagtaggggaccgctatggaaatcataaagtgttattaggaggactactgctttcattcctttgctttattccaatgggctttgttacgtcaccattccaattgggcgttctacgctttcttttgggcttctctactggtgcgttaatgccatcgatcaatacgttgatcagtaaaatcaccccaatggaaggtgttagtcgaatttatagttacaaccaaatgttttctaactttggacaagtgcttggtccaatggtcggttcaaccgttgcccatagttttggctacccagccgtgttttgggtaaccagtgcgtttgtctttttgaatatttgtctttctacatttaatttccgtaaaaattttcataagcacgatctcagttgaaaagaaaaaaaaaccagttacaatgaaggtaactggtttttcttctattaatgacttgtcttttttggcgaaggtgcaatcaaaccaagaaggataattagtacacctgctaccaaagagatgattgaggtcaattggaaatcataagtagctcccgctagtgagctgcctagatagccgacaacttggcctaagataaatgtccaaaataatgttgctaagtagcgcatgacgacacctcttttctgcgtatcttgcttttcgactttagtttatcacaaaaaatttcaatgtaaagattttcacattttcatttattcttttcaaattagaaataaagcagaaacaaacggaattatcattttcggagggattttctatgtatcatcaattgacaaccttaagcgcgtattccttacttcaaagtacgatcaaaattcctcgttatattgctgctgccaaaaaagctggttataaagttttggggctggcagatcacaatgtgttatatggagccttagaattttatcagcaatgccaaaatgccggaatcaaacctgtgattggtgtattattcgattgcacgtttggcacatccactatgcgttttccattgtatctttttgcaaagaatctatctggctaccgattattgatgcgcctttccagtgagaaaatgatcaacggtcatttggatctatctgaatacttaacgttaccagatctgtttggtattttgccgcaagggcaaggtttctctccagatcagtcggaagacttggcacagctttctcgagcattgacagactttgtcgctcgttttgatcaaaagagtcttttcctgggtgttcaaaaagcagcggcaacgccagaaagagagtggtttcaacagcacggtcttgagctgtgcgcttatcaacccgtagcagcattggaacaagcagaactatttgctgttcaagtcatggaacatattaagaacggtactcagatcgaagattttcgtaaagcgaaggaacaatcttccgaaacgtattatttagaacagcctgcggaactgattcaggcatttggagagaattcagaagcattggtaaataatcagcgaattgcagaagaatgtactctgacgattcctctccatcaacgtttgctcccgcatttccctttagaagaaggagaaaatgcggctgattttcttagaaaactgtgttttgaaaagttgtctgaacgtattacgcaggtcacagatatttaccgtcagcgtttggattatgaactatccgttattcatacaatgggatttgacgattactttttgatcatttgggatgtgatggattttgctcacaagaacgaaattgttaccggcgcagggcggggctcagcagcaggttcattagtagctttcttattagccatcaccgatgtcgatccaattgaatatgacttgctgtttgagcgtttcttgaatcccgaacgctatactatgcccgatatcgatttagatattcctgataacagacgtgatgagattttgcattatgtccgtcaaaaatatggtcaggagtacatggcgcaaattgctacttttggaacgatggcggccaaaatggtgctgcgggatgtttcacgagtgtttggtttgtcacaaagcgaagccaatcgctggtcaaaagccattcctaacgcattaaaaatgacattggctttagcttatgaacaatccaatcaattacgagaactggctaccttcaatgaacgaaatgaaacgatgtttgcagtggctaaggtactggaaggattgcctcgacatgtttccacccatgcagctggtgtggtgatcagcgacaagaatctcttggacctagtcccccttcaacaaggaagtgatgagatcctcttgactcagttcacaatgaatgatgtggaaacagtgggattgttaaaaatggattttttaggattacggaatctttcaatcattgacaatactttaagagggatcaagcgagttacaaatgaaacagttacccagaaatctattcctttaaatgacccagctgtgctgcgactatttcagcaaggcgatactgccggaatctttcagtttgagtcagcggggatcagaaatgttttgcgaaaacttggacctgaaagtatcgaagatatcgcagccgtcaatgcgttgtatcggccagggcctatgcaaaatatcgatacgtttattcgacggaaaaaaggacaagaaaaagtcgtttatccggatgctgctttagtgccgattttacaaaatacctatggaatcattgtttatcaagaacaaatcatgcaagttgcttctaaaatggcaggcttttctcttggtcaagcagatatcttgcggcgagccatcagcaaaaagaaaaaagacgtcctagatgaagaacggcgccattttgttgaaggagccgtagccaaccatttttccgcggagaaagcagaagaagtttacgattatattgagcgttttgccaattacgggttcaatcgttctcatgcgtttgcctactcatttatcggcttccaaatggcgtatttaaaggtacattatccaggaccattttttgctgcattattgcactcggttaggaataatccaggtaaattaaaagaatatttgaatgaagcgactcggtatggtgtagcaatcttaccgccgtccatcaacaagagtggctatagtttctatcttcaatcggaaaaacagattcgttttggctttagcagtgttaaaggaatacgtagagacctgattcaagatattttagatgaacgaaaggagaatggaacattctcctccttagatcaattcctgttgcgcttgcatcaaaagaataacaaatggctgaaagaagattatatccgtccgttgttaagtattggtgcgtttgatgaattggtcactaatcggaagcaagcacttatccaattagaagggaaaatccaaaatatcacctatagtggcggcagtctcgatttgttagagacaatggctctcaaagaagccgaagtcgctgattatgacttagagcaaaagttagcgttggaagaagaatatctaggggtttatttatcagggcatcctgtccaacaatatcagaagctgcaacagttgaagcagacgatagcaatcgctgacttagttcccaacgaacgtgtccggatactattttatgtgcgtcaaattcgagaaatccgtacaaaaaaaggagagcaaatggcgtttcttgaaggaacagatgctagtaaagaagtctcaatcactgtttttcccacattgtatcgtcacatacgatctgacgttgcagaaaacgccgtcttgtatgttgaaggaaaagtggaagtaagtcgttacaatggtgaaatacaactgattgctgataaaatagagctagctgaaaaagcgcaagcacagctaacagataaaacgtgttatctgaagatcacacgtgatgttgagacgaaccatttgcaagaattgtcgcagttgctgagaaagcatcgaggccgggttcctgtggtgttgttctatgaaagcaacgggaaaaaagtgttgctgacggaagagaactggctaaaaaaagacgaagaaatggaaagaaagcttgggcacttgttgggagaggaaaatgttgttttcaagtaattttccgaaaacgttaaattttacttacacttttttcaactttttcccactatttcaagacatttctctggaataatggtaaaatactactcgtggttattacttgaaaagtatcaaataagggagttccaattccctaaacaaatctactaatgaggtgaatggataatgaaacgcattggaattctaaccagtggcggcgatgcgccggggatgaacgcagcggttcgggcagttgtaagaaaggctatctttgatgggctggaagtatatggaatcaattacggctatgctggtttggtagctggagatattcgccgtcttgatgtggcagatgtaggtgacaagatccaacgaggcggtacattcttgtactctgcgcgctatcctgaatttgcgacacaagaaggtcagttgaaagggattgaacaactgaaaaaattcggtattgaagggttggtcgttattggtggcgacggctcttatcatggtgcgatggctctaacacgccatggttttccggcgatcggtattccaggaacgattgacaatgatattcctgggacggactttactatcggttttgatacagcaatcaatacagtattggaatcaatcgaccgaattcgtgacactgcaacttctcacgtccggacattcgtaatcgaagtaatgggtcgtggtgcaggtgacattgcgctttggtcaggagttgccggtggggcagatgagatcatcatcccagaacatgactttgatatggccgttgttgcgaaccgaattcgtgaaggacgggaccgcggtaagaaacactgcttgatcgtcttagcagaaggcgtgatgggcggaaacgaatttgctgataaattatctgaatatggcgatttccacacgcgggtatcgattttaggacacgttgttcgtggcggatcaccaagcgcaagagaccgcgttctagcaagtaaatttggtgcttacgcagttgagttgcttcaacaaggcaaaggcggattgtgcatcggtatcgaaaacaaccagatggttgctgcagatatcatcgaaacgcttgaaaacaatcgtcacaaaccagatatttctttatacgacttgaacaaggaaatttccttttaagtttaggaagtatgaaacgcaacagtaattttgtaaaaaaagcttattaagctattttaaataaatgaataggagcgtttagtaatgaaaaaaacaaaaatcgtcagcacattaggaccagcaagtaatagtgtagaaattatttctgaactgatcgaagccggtgcaaatgtcttccgtttcaatttttctcatggagatcatgaagaacaattaggacgtatgacaatggtgcgtgaagcggtcaagaaaactggtaaagatgtagggattcttttagatactaaaggagcagaaatccgtacaaccgttcaagacacaactgaagcagattatggtcgtgccggctatatccaattcaacgttggcgaccaaacacgtatctcaatggacccagaacacaaaggaacaaaagaaaagattgcagtgacctatcctggattatttgatgatgtatatgtaggcggccatatcttatttgatgatggtttgatcgatatggagatcatcgaaaaagacgaagcagcacgtgaattagttgttgttgttaaaaatgcaggaatgttaggttctcgtaaaggggtcaatgcacctggcgtatcaatcagcttgcctggtattactgaaaaagatgctgacgatattcgttttggattagacaatgatatcgacttcatcgcagcttcattcgtacgtaaagctcaagacgttttagaaattcgtgaaattcttgaagaaaagaacatgactcatgtacaaatcttctctaaaatcgaatctcaagaaggtatcgacaacattgatgaaatcatcaaagtttctgacggtatcatggttgctcgtggagacatgggtgttgagattccagcagaagaagtaccaatggttcaaaaacgaatcatcaaaaaatgtaatgcggtaggtaaatcagttatcactgcaactcaaatgttagaatcaatgcaacaaaatcctcgtccaacacgcgcagaagcttctgacgttgccaatgcagtctttgacggaacagatgcaaccatgttatctggagaatcagcaaacggagactatcctgtacaagctgttgcaacgatggctcgtatcgatatcgaagcagaaaatgctttagcagaaatgagtactttccaaatcaaccaatttgataaaactgatgtaacagaaacaattggtctttctgtggcacgtgcagctaaaaatcttggcgtaaaaacaatcgttgctgcaactgaatctggctatactgcgaaaatgatttcaaaatatcgtccagatgcagatatcttggcagtaactttcgacgaacgtacaaaacgtggtttgatgttaaactggggggtttatccaacagttgctgaaaaaccttcaacaactgacgaaatgttcgaattagcagctaaacaagctgtggatcttggttttgccaaagaaggcgatttgattttgatcactgctggtgtgccagttggagaacgtggaacaacgaacgtgatgaaaattcaaatgatcggttctaaattgcttgaagcacaaggaatcggtgaaaaatcaatcgtttctaatgccgttgtagccaacagtgcagaagaagcaattgctaaagcaaaagatggcatgatcttagttgttccaacaacagataaagaatatatgcctgcaatcgagaaagcagcagcacttgttgttgaagacggcggtttgacttctcatgcagcagttgtcggcattgcgaaagaccttccagtgatcgttggggcaaaagatgccacaacaacgatcaaagatggtgaattgattactgtggattctcgtcgtggaatcgtctaccgtggagaaacaacagctatctaatcttctttcgaaagattgattaatggaggcaacaggctcgtgcataagtagcgagtctgttgtttttttctctaaaagcaatcacttttttgtgcgtaaaattacagctgtagaaatgaaaaaggtgtcaagaaaatttcattgacaaagggaaataacccctgtataattgcttttgttgcttaggggtgataaaaatgaaatggtctttattggaattaaaaaaataccaagagacaccgctaatgttcgacgaaacgttgaacttaaaaaatcaattgataaaacgcgatggacagatcattgatttgtctcctgtgaaaatcactggcatgatgtctgttggaaaacatgaatatctcctacattatcgagtggagacaaccatcacgttaccttcaacacgctcattgactccagttgctttgccaatggattttacagtggatgaactcttcatgacaccagagcaatttcagcggcgagatgaaatgattccagaagaagatgtcttgatcattgaaggtcagacgatcagtttggatgattcagttgctgataacctattacttgcgattcccatgcaagtccttactgaggaagagaaaaatagcacagaaatgccgtcaggaaatgactgggctgttttatcagaagaagactatgcaaaccaaaaagaagcgcaagcccaacaaattgatcctcgtcttgcaaaattatcggaactgttcaatgattcagaagatgataacgcgtaggattggaataaattgcagcctcaaggttgctttcatttacaaggaggtgtagcaaaatggcagtaccagcaagaagaacttctaaagcgaaaaaagcaaaacgtcgtactcattacaaattgacaatcaacggtttgaacgaatgtgcaaactgtggtgaaatgaaaaaaagccaccatgtatgctcaaactgtggtcattacgatggaaaagatgtagcaacaaaagaagcataatccttttttacagaaaaatggatttcaaaatcctaaggctaaccatggagccttaggatttttctttttgtttcagattagtttcatgaaaactagaacttttctgaaataattcttactctttgaaagagaatagttcaaaacaactatcttttgcgctataatgaaacagataactgaatcttaggaggatgagtgatgacaaaacaacaaatcggcgttgtcggtatggcagtcatgggaaaaaacttagcgttgaacattgaaagccgcggttattcagttgccctattcaaccgtacaggatctaaaacagaagaagtagtaaaagaacatccagataaaaactttaaagcaacctatacgattgaagagttcgtacaatcgatcgaaacaccacgacgcattcttttgatggtcaaagcgggttttgcgacagacgcaaccatccaagaattattgcctcatcttgaaaaaggggacatcttgatcgatggaggaaacacattcttcaaagatacgatccgtcgtaatgaagaattagcaaattctggtatcaactttatcggtaccggagtttctggtggagaagaaggcgcattgaaaggcccgtcaatcatgcctggcggacaaaaagaagcgtatgagttagtggctcctattttggaacaaatctcagcaaaagcagaagatggcactccttgtgttacctacattggaccaaatggtgcaggacactatgtaaaaatggttcacaatggtatcgagtatggagatatgcagctaattgctgaatcctatgatttgatgcaaaaaattctagggctatctgtttctgaaatggcggagatcttctctgaatggaataaaggggaattagatagctacttgatcgaaatcacagcagacatcttaacacgcaaagacgatttaggtactgggaaaccaatcgttgatgtgattttagatgctgccggcaacaaaggaacggggaaatggacgagtcaaagtgcattagatcttggtgttccactgccgttgatcacagagtctgtttttgcgcgttatatttctgcttataaagaagaacgagtgaatgctagccaagtcttaccaaaacctaaaggattcgaatttacaggagacaaacaagaatttgttgagaaaattcgggaagcattgtatttcagcaaaatcatgagctatgcacaaggttttgcgcaattacggaccgcatcaaaagagtatgattggcaactgccatttggtgaaattgctaaaatctggcgtgcaggttgtatcattcgtgcgcaattcttgcaaaaaatcaccgatgcttatgaaaaagatacggatatcgaaaacttattgcttgatgactatttcaaggaaatcacaaaacgctatcaacaatccgttcgtgacgtcgtagcattggcagtccaagctggcgtaccagtcccaacattctcttcagcaattgcttattttgattcttatcgctcagatcgtttgcctgcaaacttgatccaagcacagcgggattatttcggtgcccatacgtatgaacgtacggacaaagaaggaatttaccactactcttggtatgaggaagaataagtcgaacaattgagaacaaattaagagaatgaccgaacagtgagaactttcggtcaatctcttttttattttttagatacatgataaaataaagcagatagtgtctaactatatgcagaataaccgataaaggagctctaactaatgagtaatattctaatcattgaagatgaaaagaacttagctcgattcgtggaattagaattaaagcatgaaggctataataccgaagtacattataatggcagaactggattggatgcagcgttgaacaatgaatgggatgccatcttacttgatttgatgctaccagaactaaacggattagaagtttgccgtcgtgtgcgccagaccaaaaatacgccaatcattatgatgacagcaagagattcagtgatcgatcgggtctcagggctagatcacggagcagacgattatattgtgaaaccctttgcgattgaagagctactagctcgtttgcgtgcgctgttacgtcgaatcgacattgaaggagacaaaaatgttgccaaacaaacgacgatcacttatcgtgatttaaccatcgagaaagaaaaccgtgtggtgcgtcgaggcagtgatgtcattgaattgacgaagcgtgagtacgagttgcttcttactttgatggagaacgtcaatgtcgtcttagcccgtgatgttctgctgaacaaagtttggggttatgaaacagaagtagaaacaaacgtagtcgatgtgtatattcgttatctacggaataagatcgacgtacctggagaagaaagctatatccaaactgttcgggggacaggatacgtgatgcgttcgtgagcttaaaaaaaagaatgaaaaaactaaaagaactgaaggggccttctttgactgtgaagtgggccttcgcaagttctttctttatatttgttgtttttacaatttttgcagtcatcacctacaaaacgtctatcaacctgcttgtggctaaagaagaaaataacgtggagcgtacgatgtcggaagtagcttctaggttagccaattcagaccaagaattgacattggtgcgtacctatcgcaatttaactaagaacgatagtggtgatacgagcatctacgaccgaacttcaacaattgatgggaacttaatgaagatcgactcgtttatttccgagttaggccagtctcctttgagcttatttgtttataatctgaatcaggaattgattttcaaaacccatgaaaataatctttctctgatcgatgtgcagcgaaagtcgcccacgatcgtgacattggacaatattacaggctttttgtcgatccagccaatctactcaaaagaaacgagagaaaaaattggttatgctcaaacattttatgaactgacctccttttatgaaattcgcagtaagctcttgttaacgctaatcatacttgaagtcgtttccttgattctcagtagcgttttaggttttttcttatctgcttatttcttgcagccactgaaagttttgcgggatacaatggaaaccgttcgaaagaatccccaatcgaccgtgcatatgcctgaactgaatacaaatgatgaattatctgatttggcagacatctttaatgagatgctcgaccgtatgcggctatatatcgagcagcaagaacggtttgtagaggacgtttctcatgaattacggacgccagtggcaatcattgaaggacatatgagtctgttgcagcgctggggcaaggacgatccagaagtattagatgaatcgcttgcagccagcatgcaagaaatcagtcgaatgaagacacttgtgcaggaaatgctcgacctttccagagctgagcaagtagatgtccactatgcgaatgaaacgacaaaagccaaagaagtcgtataccaagtatttaataattttaaaattctttacccggaatttgttttcacattggatgatgatctttaccacgaattgactttaaaaatttatcggaatcatttcgaacaaattattattatcatcttagataatgccgtcaagtactccacagatcgcaaagaggtccatttatctatttcttctgatcgacaaacgtttgagattgcaattcaggattttggtgaaggaatcagcaaagatgacttggataaaattttcaatcgattttatcgagtggataaggcgagagcaagaaccaaagggggaaatgggttaggactatccattgctaagcaattattggaaagttataaagggcgcattactgcagaaagtgtgattgggcaaggaacgatttttagaatatatattcctgtggttcaatctagtaaggatgttttgaaatagcgcagatcctctgcgaagaaaccagctggttgttgtaggttagcgacaatcagctggttttttctttataagggatcttacttaatggacagcgtttctgcttgttcatataaacaggaacgattgaggaacacgaatagttataaaacgcaattattgctataaaagcgaacgatgagataaagaatagaagaaagattcggctaaaaaaaatgttgagaaaaagctttgttttttgttgatttttcgcagtagaattgctatattagtatttgtctttgtgatagtcactgtttaaatctttcaaatattttttcaaaataaatgttgacgaagatcaagacagatgttattataacaaagtcgtcagaaagcattaggtaaaaaaacttaaaaagttagaaaaaactttcaaaaaagttgttgacacaaagctttcgagatgataagatataaaagtcgctgagagataaagagtgattaaataacaatcgcttgaaaaaacttttaaaaaaagagttgacattcacttgttaatctgatatgatttaaaagttgctaacgcagcgcagtagacctttgaaaactgaacaaagcaagcaaacgaaccaatgtgtagggcgcttcattatatgaagcaaaatacatgcaagcaatagctagcaaagttaattttatttgagcttaacgatcctatggatcgttcaaacaaatcattatgagagtttgatcctggctcaggacgaacgctggcggcgtgcctaatacatgcaagtcgaacgctttttctttcaccggagcttgctccaccgaaagaaaaagagtggcgaacgggtgagtaacacgtgggtaacctgcccatcagaaggggataacacttggaaacaggtgctaataccgtataacactattttccgcatggaagaaagttgaaaggcgcttttgcgtcactgatggatggacccgcggtgcattagctagttggtgaggtaacggctcaccaaggccacgatgcatagccgacctgagagggtgatcggccacactgggactgagacacggcccagactcctacgggaggcagcagtagggaatcttcggcaatggacgaaagtctgaccgagcaacgccgcgtgagtgaagaaggttttcggatcgtaaaactctgttgttagagaagaacaaggatgagagtagaacgttcatcccttgacggtatctaaccagaaagccacggctaactacgtgccagcagccgcggtaatacgtaggtggcaagcgttgtccggatttattgggcgtaaagcgagcgcaggcggtttcttaagtctgatgtgaaagcccccggctcaaccggggagggtcattggaaactgggagacttgagtgcagaagaggagagtggaattccatgtgtagcggtgaaatgcgtagatatatggaggaacaccagtggcgaaggcggctctctggtctgtaactgacgctgaggctcgaaagcgtggggagcgaacaggattagataccctggtagtccacgccgtaaacgatgagtgctaagtgttggagggtttccgcccttcagtgctgcagcaaacgcattaagcactccgcctggggagtacgaccgcaaggttgaaactcaaaggaattgacgggggcccgcacaagcggtggagcatgtggtttaattcgaagcaacgcgaagaaccttaccaggtcttgacatcctttgaccactctagagatagagcttccccttcgggggcaaagtgacaggtggtgcatggttgtcgtcagctcgtgtcgtgagatgttgggttaagtcccgcaacgagcgcaacccttattgttagttgccatcatttagttgggcactctagcgagactgccggtgacaaaccggaggaaggtggggatgacgtcaaatcatcatgccccttatgacctgggctacacacgtgctacaatgggaagtacaacgagttgcgaagtcgcgaggctaagctaatctcttaaagcttctctcagttcggattgtaggctgcaactcgcctacatgaagccggaatcgctagtaatcgcggatcagcacgccgcggtgaatacgttcccgggccttgtacacaccgcccgtcacaccacgagagtttgtaacacccgaagtcggtgaggtaacctttttggagccagccgcctaaggtgggatagatgattggggtgaagtcgtaacaaggtagccgtatcggaaggtgcggctggatcacctcctttctaaggaatagtacggaagactacacatcgtttgcctttgttcagttttgagaggtttactctcaaagataaatacccggggccttagctcagctgggagagcgcctgctttgcacgcaggaggtcagcggttcgatcccgctaggctccattaacgacagaggtcgttaagtttgttcattgaaaactggatatcgaagaaaatcaaaacaagtaacacacaccgagttgacaagttaaagagttttttaataagttcaacgcttattttcttgagcaaccttctatcgctagaagaagtactcaacaccgaccgtaaggtcaaaggttaagtgaataagggcgcacggtggatgccttggcactaggagccgatgaaggacgggactaacaccgatatgctttggggagctgtaagtaagctatgatccagagatttccgaatgggggaacccagcatcttttataggatgttacacagttgtgaatacatagcagctgtgaggtagacgcagagaactgaaacatctaagtacctgcaggaagagaaagaaaattcgattccctgagtagcggcgagcgaaacgggaaaagcccaaaccaacaagcttgcttgttggggttgtaggactccgatatggtagttgaaacagatagtcgaaatacttggaaaagtatgtcaaagagggtaaaaaccccgtagatgaaatctggctcacacctaggaggatcctgagtacggcggaacacgaggaattccgtcggaatccgggaggaccatctcccaaggctaaatactccctagtgaccgatagtgaaccagtaccgtgagggaaaggtgaaaagcaccccggaaggggagtgaaatagatcctgaaaccgtgtgcctacaacaagttagagcccgttaatgggtgatagcgtgccttttgtagaatgaaccggcgagttacgatagcatgcgaggttaagttgaagagacggagccgcagcgaaagcgagtctgaatagggcgaatgagtatgttgtcgtagacccgaaaccatgtgatctacccatgtccaggttgaaggtgcggtaaaacgcactggaggaccgaacccacgtacgttgaaaagtgcggggatgaggtgtgggtagcggagaaattccaaacgaacttggagatagctggttctctccgaaatagctttagggctagcctcggaattgagaatgatggaggtagagcactgtttggactaggggcccatctcgggttaccgaattcagataaactccgaatgccattcattcatatccgggagtcagactgtgagtgataagatccatagtcgaaagggaaacagcccagaccaccagctaaggtccccaaataactattaagtggaaaaggatgtggggttgcacagacaactaggatgttggcttagaagcagccaccatttaaagagtgcgtaatagctcactagtcgagtgaccctgcgccgaaaatgtaccggggctaaatagtttaccgaagctgtggagtgcaccgtaaggtgcattggtaggagagcgttctaagggcgttgaaggtagatcgtgaggactactggagcgcttagaagtgagaatgccggtatgagtagcgaaagacaggtgagaatcctgtccaccgtatgactaaggtttcctggggaaggctcgtccgcccagggttagtcgggacctaagccgaggccgacaggcgtaggcgatggacaacaggttgatattcctgtacccgttgtttttgtttgagcaatggagggacgcaggaggctaagaagtgcagactgatggatatgtctgttcaagcagtgagtcttagtgggagtcaaatgcttctactttcaaggacaagctgtgatgaggagggaaataatagtaccgaagcttctgatgtcacactgccaagaaaagcttctagtgagaaaacaatggcccgtaccgcaaaccgacacaggtagtcgaggagagcatcctaaggtgagcgagagaactctcgttaaggaactcggcaaaatgaccccgtaacttcgggagaaggggtgctgctctaacgagcagccgcagtgaataggcccaagcgactgtttatcaaaaacacaggtctctgcaaaatcgaaagatgacgtataggggctgacgcctgcccggtgctggaaggttaagaggagtgcttagcgtaagcgaaggtacgaattgaagccccagtaaacggcggccgtaactataacggtcctaaggtagcgaaattccttgtcgggtaagttccgacccgcacgaaaggcgtaacgatttgggcactgtctcaacgagagactcggtgaaattttagtacctgtgaagatgcaggttacccgcgacaggacggaaagaccccatggagctttactgtagtttgatattgagtgtctgtaccgcatgtacaggataggtaggagccgtagagatcgggacgccagtttcgatggaggcaatggtgggatactacccttgcgttatggccactctaacccgcagcccttatcgggctgggagacagtgtcagatgggcagtttgactggggcggtcgcctcctaaaaggtaacggaggcgcccaaaggttccctcagaatggttggaaatcattcgaagagtgtaaaggcagaagggagcttgactgcgagagctacaactcgagcagggacgaaagtcgggcttagtgatccggtggttccgcatggaagggccatcgctcaacggataaaagctaccctggggataacaggcttatctcccccaagagtccacatcgacggggaggtttggcacctcgatgtcggctcgtcgcatcctggggctgtagtcggtcccaagggttgggctgttcgcccattaaagcggcacgcgagctgggttcagaacgtcgtgagacagttcggtccctatccgtcgcgggcgttggaaatttgagaggagctgtccttagtacgagaggaccgggatggacttaccgctggtgtaccagttgtctcgccagaggcatcgctgggtagctatgtagggaagggataaacgctgaaagcatctaagtgtgaagcccacctcaagatgagatttcccatttctttaagaaagtaagatccctgagagatgatcaggtagataggtcagaagtggaaggccagtgatggttggagcggactgatactaatcgatcgaggacttaaccacaattgaaaaaagcaaggaaactcggaagagttttgattcttcgatccagttttgagtgagcaatacttactcaattgaatagtgtggtggcgatagcgagaaggatacacctgtaaccatgccgaacacagaagttaagcttcttagcgccgattgtagtgaagggtttccctttgtgagagtaggacgtcgccacgctgtttcattccggcatagctcagttggtagtagcgcatgactgttaatcatgatgtcgtaggttcgagtcctactgccggagttctcttacaagagaaaaaagggtattgagcttcttttaggctggagagttgtccgagaggccgaaggagcatgattggaaatcatgtagatggctaccgctgtctcaagggttcgaatcccttactctccgttataatcttggtccgttggtcaagtggttaagacaccgccctttcacggcggtaacacgggttcgaatcccgtacggatcattacaatttaatgaacacccggaggtttagctcagctgggagagcatctgccttacaagcagagggtcagcggttcgatcccgttaacctccattacggtttggtagttcagttggttagaatgcctgcctgtcacgcaggaggtcgcgggttcgagtcccgtccagaccgtttcattattattgtaaatacaccatgttattttggctcggtagctcagttggtagagcaatggattgaagctccatgtgtcggcagttcgattctgtcccgcgccaccatggaggagtagcgaagtggctaaacgcgacggactgtaaatccgttccttcgggttcagtggttcgaatccactctcctccattttataggggcatagtttaaaggtagaacagcggtctccaaaaccgttagtgtgggttcaattcctgctgcccctgccattattattttaaaaagttttcttatcacggcgggtgtggcgaagtggttaacgcaccggattgtggctccggcattcgtgggttcgattcccatcactcgccctttcatttttggggtatagccaagcggtaaggcaacggactttgactccgtcatgcgttggttcgaatccagctaccccagttcgatttacatttttgtaaattgcagaaatagtataatggcggtatagccaagtggtaaggcagaggtctgcaaaaccttcatcaccggttcaaatccggttaccgccttagtacgatactaatatttgcgttatgccgacgtggcggaattggcagacgcgctggactcaaaatccagtgcccgcgagggcgtgccggttcgaccccggccgtcggtattatcggtacatcattcgttcgtacgattgatgtatcgatttttatcctaatattggttgaagatcaactggttggataaaaaaagctgttaaaatttagtaagtacttgagtgatctgcaatcatgccgacgtggcggaattggcagacgcgccagactcaaaatctggtgtccgcaaggacgtgccggttcgaccccggccgtcggtataacaatgaagcatcaacgtaaggaatacgttgatgctttttttatttaaatgtgtgctttcttaaattttgaaaggattgatctttatcagcaaaaagaaaaagtgttgcgaattactgttttagaaaatttactagaatgcgtatttattttcactagctgagaatgaatgaaaaaagttgcattagttaccggtgctggtcaaggtattggctttgccatagctaagcgtttgtacaaagacggctttgacgtggcaatggtggattacaatgaaaactctgtaagagcggcagcgaaagagcttggtgaacatgcgattgctatcaaagtagatgtttcgaaacgggatgagattttttcagcagttgataaagtaatagatgtctatggtgacttatcagtgattgtaaataatgctggggtagcaccgactacaccgatagagtctattactccagaacagtttgaaaaagtttattccgtgaatgccgggggcgtattatggggaacacaagcggcttctgaagcatttcaaaagttgaatcatggtggaaaaatcatcaatgcttgttcacaggcaggtgttgtgggtaatcctaatctcatgttgtacagtagctcaaagttcgctgttcgtggtatgacccaaatcgctgcgcgagatttagctgactatggtattactgtaaatgcttatgcaccaggtattgttaaaacaccgatgatgatggatattgcgcatcaagtaggtgctaatgctggtaaagatgatgaatgggggatgcaaacttttagtaaagatatcgcattgaaacgtttatctgaacccgaagatgtttcggcagttgtttcatttttagccagtgatgatgccaactatataactggacaaacaatcattgtggatggcggaatgcagttccagtaatcaataagttgttgatctaggattgggcgttcggatagtcccgcaggttttcagttgattgaaactcaccaaaatagtggcattttcttgttcaattgttactgtaagaaaaactaaatgatagtagttatgtaatttgctgtttcatgcaaatcatcgaatgaatgacccgattagaatctatctaatcgggtcattcatctgtatacgaaggaacgatcgaaaaagtctgagaatggagttatcacaaagaatagaacaaaagataaagcaattctttagcccttggcaaatttgatgatttcaacttccatgggggcgagggtgagttcacaaacttttctttttgataataatgctgtaccttccgatagaaattgtacttgttgtgaatcgtttgtatgattaagtaggaataagaagatatgggttggtccttgtcgaacagtgacagacaactcgctgttttcttgcaaatacctctcagcaactttttttagttttgcatcactaaaaatgtcgttcaataagtcggtcaacccttcttggtctaactcggttcctaaataataagccagtcctttgccaaaccgatgtttagtgatagctggtgaatctttaaggaaatcactcgtgaaggtagccagtggggtagcaccttgtaagtggatcacttcttcccactgacgattttcataaaatttatttttaaaatgcacttgttgctggatttccggttttaaaggctgaaattcttcaactatgatccctaatacctctttaaaaagtcctggatagccgccaagatagacttgatcgttttcgttgacgattccgctgaagaaatttgtcaggaatgttccaccatttgctacaaattctttgactttattgccgaattcttctgatgcagagtacaaattatacgcaatcacaaggggatagccgtctagtgattcagatggatgaatgaaatcaacagcaatgttcaacgctcttagagcggcatataacgccctcatttggtgaatatagcgaatattggcattcggcttcgcatctagctcaagggcccaccaattttcccaatcaaatacgatagcaatatcggcaacaaaccggctgccaacgatgccattcaactgttttaattcatttcccagagcagcacattctcgaaaggtgcgacttgtgtgtggatcaccatgagggactattgcactatggaatttctctgcccctccttgtgattggcgccattgaaagaacatcatgccatcggagccatgagcaagtgcctcataactccataagcgcatttgaccgggttttttgacgccgtttacttggcgccagttgaccgcacttggggcttgttccatgatcaaaaaaggtttcttttttaaacttcgcatgagatcattggctaagaattggggatagggcagagattcaaacggattaggataggcattccagctaacgacatccatttcagaagcccatttgaagccatcgacatatttatgaagacccatcaaattcgtcatgaatgggatgtttgacgagaatgtttgaattgcctttttctcgatctgataaatttccagattcatatcagaaatgaagcgacgataatcaagctgttgacaaggattcttaaaagtcggcatttcttctggtaggaaaatctcatcccattcttgataggtttggctccaaaattttgttgaccaagccgtattcaatgcttcaattgtttggtattttttttctagccaattttggaaactggcacgacagttcgggcaataacattcatggatgtgacaagtatattcattattgatatgccacatcacaactcccggatgttggctgtatcgtttggcaacagcttcactgagccggcgggcatattcccgataaatcggtgaggtcggacaatagtgctggcgagaaccatgtaccaaccgattgccatgaatggtcatcggcatcatttcaggatattttttgactaaccatgcagggggcgaagctgttccattggctaaatcgatggcaatattgttttcataaaggagatccatcagccaatccaaaaaagtgaaatcaaatgttgattcatttggttgaatgtttacccaaccaaaaatattgatgctgacataattgactccaacttctctcattaagcgcatgtcttcctttatcgtttcttgtgaccactgttcaggattgtaatctgcgccgtaataaatttgtttttgatcaaccatctgttaaacttcctttctcgtagtaagacatatttgtttcaatcataacaaaaaaagtaaaagctgaaagcgctggcaaaaaggtgcatgaaataatacaaatatctgtaaaatgttcaaaccgatctcaatacacgagaaccatattacttgctgtttttttattttcaacctacaattaaatataattgataacactcaattcttaatgaagctgtattattattagatgttcttttatatttatgcacatcttcagcattttgaaatgagcgaaaggaatggttggatatgtcaaaacctatacaaatattttcagaaattgaaccgttaaaacgggtgatgctccatcgtcctggtgcagaacttgaaaacttgatgccggattatttagaagacttgttgtttgacgatattccatttttggcacaagcccaacaagaacatgatttttttgcaaaagttttagtggagaatggctgtgaagtggtttatttagaagacctggctgctgaaacattacagctttcaggatgtaaggaagctttcttggatgattatttgcaagagacgaaaattcaagatcaagatgtattaaatgaagtcagagactattttctttcgattaaagacgaacgagcgtttattgatcaaacgatggcggggttaaaaaaacaggatctttccatatcgaagactgcaagtttctcagcaatgcgggaaaatgattatccatttattattgatccgatgccaaacctttattttacaagagatccgtttgctattataggacatagcatttctcttaaccggatgttttccgaaactcgtcgaagagaaacgctttatggacagtacattttcaagcaccatccgcagttcgccaagccatcggtcaatttcttgtatgatcgagaagaacctgcacgtatcgaaggtggggatcagcttgttttgtcccagcatgtattagcgatcggtatttctcagcgtacagaagtgcactctatcgaaaaaattgctgaaaacattttttcaatggaaccgtcatttgaacatattttagcatttgatattggttctgaacggaaatttatgcatctggacacagtctttaccatgattgataaagacaagtttacgattcaccctgaaatagaaggtgaactaaccttgttctctattacaaagcaaggacaagaaatcaaagtagttgaagaaaaagatacgttagatcacattttatgccgttatttggacttgccggcagtcgagttgattcgttgtggcggcgacgatatcacggcagctgccagagagcaatggaacgatggatcaaacacattagccatcgcgcctggcgaagtgatcgtctatgaccggaatactattacgaaccaacttttagcagaggccggtattaaattacatcaaattccaggtagtgaattagtaaggggccgtggcggtccccgctgcatgagcatgccgtttattcgtacagctgattgatagaatgactagctgatttaagtgtttttttatcagcaaaaaacaggtggcatcacaaattaggacgtttaaaaaagatgagaggaagtcatttttctttcatcttttttttatttgattaaaaaacctccattataatgaaagggattacttttcgtgaaattgtgcaaaaaatttaaattttatatgtaatgattgtaaaaaaacagatgaaaccttgttatactacaaaatatatgttacggttatattagtgacgcgggtaagtgtgagtagatgacacttattaaattttaacaccatacgaacagcgatcgcttgattcgtaatggttttttttcgcgaaaaaaagtagaaagtaggtgagagaatgtctgtagatgccattcgtttgctgcaagaagcagaagagtttgcagaacaaaaaaacacgaaagcggaagctaaaaaaaaacaactgatccatgaaagtcaaacaagaatttcagcattccagaaagaattggtacaaaaagaacgtgaagcacaacgaatgattgaagaaaaagttgcaacggaatttgagcaatcaaaacaaccccttgtgacaaaaacaaaagaggaagttgagacattgcgcacgatttcagctgagttgagagaacaagcattggcaataataataaataaggttgtgacatagatggcgattgcaaaaatgcaaaaattcagcctgttaaccttttacgaacaaaaagatgccgttttacagcagttacaagactttcaaggtgtcgaattgctttcttctgaaatgtattacgagtcagaggaaaccacaggcgtgttaacacccgttcgtgatgaacagaaacagactgaagaagtagaaaaccaatttgatcaagtaaattggggcctgcaattattagaggaatatgttccaaaaaaaggaatgctggaaaaacttcggcaaccaatcaagcgctacacacttcacgaattagcgcaagccgctcatacttatccttggcaagaagtttgtcaaacacttcgaaaacaagacaaacgtttacgattgatcgaacaagaaaaacgagagcttttggctcaagaagcagaactgaatagatggaaatactttgaagaccgtcctcagattttgaatgaattaaaaaaatcaggtggcctattaggttcgctcccaaattcagaatttgcggctttcacaaagggttgcgaaaaactgccactcgtttattttgaaacagtttatcaatcacaaacgactacatacttattcgttcttttccataaagatgttaaagataaagtaagttctcttttaaaaaagactgcattcgagcagtatacctatccctattcaggtctgccaaaagatgacctgcaacatgtaaaagaaaaatcccacgcattgattgaggaagaaaaatcaatcaaacactccttacgtgcaatgagcgaagagcagggacaattgcgtctcgtagcagagtatttagatggcgcgatcaaacgagctcagagtaatgaaaagttgcttcgttcggctcatgccgtagctatttcaggctggatccctgttgagcaagcagcagaactggagaaaaggatccaacaggccagcaaagatgctttttatcttgaataccaacaagtgaaagaacaagaaatcgaggatgttccgattttgttgaataattcgcggtggatacaaccctttgaagggttagtgcggatgtatagtttgccccagtatgatgaattagatcctacaccgtttatggcgccattttatatggttgcatttggaatgatggttgcagattttggctatggattattactgtttttggcaacattcttgggcaaaaaattctttcatttaagtaaaggattggaacaaaatttgacgctgtttcagctttgttcgattcccacgattatttggggcttgatttatggtaatttctttggctttgaattgtcattccaattgttatcagcccaagaagatgtcaatcagattttggtcttgtcgatcattttcggatatatccaaatcatgtttggattagctttgaagttttatgtcctttggaaacgaaaagatcagaagctacaggctgtttttcaggctggatcttggatggtctttttgatcagtgttgttctattggcagcaggaatgttgctgttgcctgattcgcctttacaaaccattggttttatcatgattatcgctagcttaggggcagttgtatttggcggtagtttagaaggcaaaacactagctggtaaaatcggctcaggactatatggattaatggatgttacgaattacgtaggggatatgatcagcttcacacgactcatggcattaggagtcgcaggaggcagtatcgcatccgcattcaatttgatcatcagttatttaccaatagctgcgcgtttcacagtcggtattttgctttttgtggcgctccatgcattaaatatctttttaagctatttaagtgcgtatgttcatggtattcgtttacagtatttagaatatttcggaaaatttttcaccggtgggggacgagcatttgtacctttcaaaaccgatgaaaaatacgtagaagttatctcagaagagaaaatgcaggaggaaaagaatggaaaattggattagtttcttttatgaaaatggtgggttagtttttgccgcattaggtgtagctacagcgacaatttgtggtgggatcggttcaacgatcggggtcggtatgaccagtgaagccgctgcaggattgactgcagagcaaccagaaaaatttggacaggccttgatcttggaactgttgtcaagtacccaaggactatacggtttcgttatatcattcatgatttttggtcaaatgagcggaacgatctcccttgatagaggaatgtacctatttatcgcttctttacctattgcgttgacagcaatcgttgccggaagatggcaaggacgtgctgcaagtgccgctatgcagattttagccaagaaaccggagcacgtaacaaaagggatcatttatgtagcgatgatggaaacgtattgtatcttaggtttcgttatttccttcttgctagttttaaattaagagggggagaaagatgtctgatattacgcgattaaccgaaaaaatcacagcagatgctgaaaagaagtatcagttggtccttaatgatgcacaagtagaaattgaaaaacaggagcgtctcaaacgttctcaactagaagaacaactttctgatcgtttggcccaatttgaaaaagaaaaacgggcagaaatgtatttgcagatttccgatattcacattcagtctcgcaataaagtgcttgccgcgaaacaatccgttttggaagaattgtttagtgaggcacttgagcgcttgaaccaaatggaagccgctgattttcaagcattcgtcacaaaaggagtacaagaagcacaggtttttggtgaagttgaattggtattgggagaaaaaagtgcgcatctgctgacagaaggttcattgaaagagattcaacaaacgattcctgaatgtcgactaacagttgcaaaacaagttttgccgcgaaaaggcggatttttactgcgccgaggcgatattgagctgaactttacgtttgatgcgttgttggatgccagcaaagaagagttgagtcatacattactgcaattgatttttgaacagtaagcgggtgtaaaaatggaagatatcaaatacaacacgctgaatacacgaatacgaacctatgaagcggaattgatcagtcgcagccgttacgaacgtatgctttctgccaacagtgccgaagaagtttatgctcttttgcgagaaaccgtttatggtgattttatcaatgaagaagatcgagtccatgattttgaacaagtattgaccgcagaattaaaacgagtatatgaaaacttgtatcagctaacacctgatcgttctgtggtggattattttgcccttcgctatgattatcaaaatctgaaggtgttagtaaaagctaaattcatgaaacaagacttttctgaatttttggtaccgatcggaaccatgcctttaaatgaattgaaagatttggtcaacacaagaaaaagtgcgcacgcagagcagccaatgattgcttgtatcgatgaagtattttcctatatcgaaaattatcatgagattcaatccgtagatatcatttttgacaatcatttttgggaacatctttggtcaattggtaagcgatatgatgatccgtttttacaaggaatcattcaacggcaagtagatatttttaatatttcgacagcactacgtagttacgccatgaagcgtcatcgaggctttatcagcgctgttctagcagataatgggactctccctgcaaaagagctgttggaagcaatcacgacgtctttggaagtttttgtccagtatctgcaaaatacaccttacaaacatttgatcaatcacagctatgaagaactgcttgagaagaagacccttaatacgtttgatctgcgaaaagataactttttgatgggaaaattgaaagaacaaaaaatcgtgccattcggtccagctgcgatgatcggttacttgtatgcaaaagaaatcgaaagtaaaaatttacggattattttgattggaaaaatcaataaagtgccggaagagatattaagaagtcgggtgcgtgatacgtatgaataaaaaaatagcaatgatgggtggcaaaaactcaattttgcccttcaaaggtctaggaatcgatatctatcctgtagatgatcttgaagaagccgcacaacagctgcaggaaatggcagaagactatggggtgatcttcttgaccgagcgattgattgaacagttggagtcaatcattcgacaatacgaagaactacccacgccagccatcatccccatccccagcagtacagggagtctagggatcggaatggcacggatccagcagaatgtcgagaaagctgttggaatgaatatattagattcttaaaagagaagtacggcaactaggaggaatgcatgtggcatttggcacaatagaaaaagtatctggtcccttggtcacggcctcaggtttatcaggagctaagatccatgaaatctgtaaagtcagtgaaaaaggcttgattggagaaatcatcgagatcaagaaaggtctcgtgtcgatccaagtatatgaagaaacagcaggaattggaccgggcgaacccgttgaatcaacaggggctccgttatcggttgaattagcccctggcttgttgacagaaatgtttgatggtattcaacgtccattagatacctttatgaatcaaacagagagtgattttttggaacggggtgtgaccattgacccgctaaatcgtcaaaaaaaatggacgttcatgccgcaagtaaaagtaagggacaacgtacaagctggagacattctaggacttgttcaagaaacaacagccattgaacacaaagtgatggttccgccaggtgtgaaaggcactgtaaaggaaatcatggtaggtaattatgctattactgaaccgatttgtcttttagaaacggcagaaggcgaacaacgcttgactatgatgcaaaaatggcctgtccgtaagcctagaccgactgcagcaaagttaaatccgggtgaaccattagtcactggtcaacgggtgatcgataccttctttccggtagctaaaggtggatcggcagctgtgccgggaccttttggtgcaggaaaaaccgttgttcagcatcaaatcgcgaaatggtcggatgtcgacatcgttgtgtatgttggttgtggcgaacgcggcaatgaaatgaaagatgttatcaatgaatttccagaattgatcgatcctcacacgggtgaatcgatcatggaacgaaccgttttgattgccaatacttcaaatatgccagttgcagctcgtgaagcttcgatctatacaggaatcactattgctgaatattatcgggatatgggatacagtgtagcgatcatggcagattcgacttcacgatgggccgaagcattacgagaaatgagcggtcgtttacaagaaattcctggagatgaaggatatccagcctatttaggcagccggatcgcggaatactatgagcgtgctggtcggttccgttcgttgggatcggagcctcgagagggcagtattacagctattggtgctgtttcgccagctggaggggatatctcagaaccagttactcaaaacacgttgcggatcgtgaaagttttctgggcattagacagtatgttggcacaaaagcggcattttccttctattaattggctgaactcctattctttgtatgaagatcaaatcaattcttatttagatcagttgatgggacctcgctggtcggagatggtcaatgaagcaatggcgatcttgcaagaagaaagccgcttagaagagatcgttcagctagtgggaagggattctctctcacagaaagatcgtttgacgatgatgacggctcgttctttacgtcaagattatctgcagcagaatgcttttgatgacgtggacacctatacgtcaagaaataagcaatttaaaatgctagaaaatattttatattttgatgaacaagcaaaacgggccttgcagctaggggcgtatctggatgacataaccaaaggtaccatcgatctgcgagaacggattgcccgcagtaaatatattcctgaagaagaactaacacgtttagatgcaatcaaacaggacacgaaagcattattacaaaaaatcgtagagactggaggaattcattaatgctaaaagaatatcgaacattctcggaaatcgctggtcctttgatggtggtagaaaatgtcaaaagcgtcaaatttgacgaacttgtccaagtgcgaatggacagtggcgaggttcgtcaagggcaggttttagaagtcagcgatgattatgccgttgtacagatttttgaaggcactagtaacctgagtgcagaagagagtaaagcccgctttttaggaacgggtttaacgcttggtgtatcgccagatatgatggggcgtgtctttgatggactaggtaagcctaaagatgatggaccgcagatcattccagaaaaacgaattgacgtcaatggtgaagccatcaatccaatggccagagattttccagatgagttcattcaaacggggatctcaacgatcgatcacttgaatacgttggtccgtggtcaaaaactgccgatcttttctgcgtcaggattgcctcataaggaaattgcagcacagatcgcccgtcaagcgactgtgccaagtcaagaaggtaactttgccatcgtttttgcggcgatcggcattcctttcgaagaagctgaattctttgtagaagagtttcgcaaaaccggtgcattggatcgctcggtattgttcatgaacttagccaatgatccagccattgagcggattgctacaccgaaaatggcattaacagcagccgagtacttagcttttgaaaaaggaatgcatgtattagttatcatgaccgacatgacaaactattgtgaagcgctgcgggaaatttcagctgctcgccgagaagttcctggcagacgcggttaccctggttatttgtacaccaacttagcgactctttatgaacgggcaggacgtttgatggataaagaaggatccgtcactcaaattccgatcttgacgatgccggatggagataagacccacccaatacccgatctaaccggctatatcacggagggacagattatcctttcccgtgatctttacaagagaaacatcaatccgccagtggatattctacctagtttgtcccgactgaaagataaaggaaccggagaaggcaagactcggcgggatcatgcggcgacgatgaaccaaatctacgcggcatattctgatgggaaggctgccaaagaactgtcgatcgtattaggggaatccgcactttcagatattgataagaaatttgctcgttttgcggatctttttgaaaaagaatacgtaaatcagggatttgataccaaccgaacgattgaagaaacattggacattggctggaaattgctcgctacattaccgaagcaagaattgagccgaatcaaagaagaatttattgaagcctatcttcctactggggaggatgtgaatccttcatggcaataatgaatgtcaatccgactcggatggaattgagtcggcttcgcaaacgcttgacgacggcaactcgggggcataagttattgaaagataaacaagatgagttggttcgccaattcattcagttagtcaaaaaaaatcaaaaattgcgccaacaaatggaatcagcgttacaagctggaatggaagagtatgttttggcatctagtagtattcctgatgtgatcttgcaagaagcttttatgattcctttgaacaaagtgacgttagatgttcaaagccgcacggtgatgaacatggaggtaccggtactcaatcctgtttatgaagaagaaagttcggatgatgatttttcatatggttttgttagtacgacaagtgagttggatctttctctgtcccatctggatcagattttgccagtcatgctgcaattagctgaaattgaaaaaacttgtcagctgatggcaaatgaaatcgaacggactcgtcggcgagtcaatgcactagaatacatgacaattccgaagttgacagaaaccatccaatacattgagagcaacttagcagaggatgaacgagcaacattgacacgcttgatgaaagtgacggatatcattgccgaaaatgaaacgcgctagacacaatgagaattcacccttttttcaactattttctgtcataaacagtaagattttttagttgagaagtcagtaaaactggtttgttttttctttgggaataacataagcttacggcagctattttcagtataaatctgaaaatagctgccgtgtttgtgttattcgtttgtaaagcgaatagctaatgatttctgcaatgtgaaagaggaggcttatttcgaacagaataggttgctatggaaagaatagcgagaaatttttcttcatgataaaatgaatgctagctatttctaaaccaaaacaaaaagtaaaagaagggataggtatcatgaatattgtggtattagcaggcggtctcagtcatgaaagagatgtatcattgtcttccggaggccaaatcgccatggctcttgaggaaagaggtcaccgagcattattgttggatttatatcaaggaaataacgagaagacatttgaatccgcttactcgattcaaaaataagaagagaatccttatgattattttgtggataagaatgaaccagatattgagaaacttatccaaaagaatagcaaccagaaaaatttgattggaaagaacgtagtagaactctgtctgaatgctgatttttgttttatcgcattgcatgggggtattggagagaacggaaaactacaggctttctttgatatttatggtattcgctactctggttctcattacaaaggcagtttattggcaatggataaagatatagctaaacaactaatgaaactgaatgacatccccacgccaaagtggcaaatctgggagcaaggacaagaagtgtattattctacaccttgtgttgttaagccaatcgataatgggtcaagcatcggagttgaaatcgttgaaaataaagaacaattttttaaggccttaaaaaaagctgaaaaatacaacagtaaagtgatgattgagcagaagatagaagggagagaattctctgtaggcgtacttggcgataatgttctgccagcgatcgaaataattccccaacaaggattttataattatgaaaataaatatcaaaaaggagcaacagaagaaataacgccagctgacatttcgagtgatttggcgacgcgattgagtgaaatgaccgtattagtgaacaaagttttgggcttatcaatttattccagagtagattatatcgttaccaaagagcttgatatttactgtattgaagccaatagtttaccggggatgacgccaaccagtttattaccacaagaagctgaagccataggaatttctttttcagaattatgtgagacaattgttgaactatcacttgaaagctggtacaaatagtcaggatgtcagcgattgattgaaggctccattaaaaaactgtgacaaaaggttcagctacactaagttcttcgaagcataatcactggataatggtatctctgatacatttttcctttggacctatagcccgcagaagtatgcttttcggatatttcgtttgttgaaagagtgatatcacagttttttatatgaaagttgatactagagattttttaaatcaagagacgtcagttgttggcaggttttggcaagcgaacgttgaaaatgatggtttcgtctttgctttctgccgagatatccccgccagatgctaacagaatctcttttgcaatcggaagaccaagaccagttccgcctgtggctgtagctcgggaagaatccatgcgatagaaaggttcaaagagacgtccgatcatctcttctggaattgtttttccacgattcgtcagacgaatgtgaatactgtctgattcgaccaattcaagaagtaaaggcgaatctggatagctgtagttgatggcattgcgaatgagattatcaaagacacgagctattttttcggtgtctactgttgcaagaacatttttttgtaagttgagttgccaatttagattcttttcttccaagagaggtaaaaactcaaaggtcagctgttcaagcattaaacttaaatcagtcgtttctgtctgcaaaacgatcgtggtcaaattgaagcgtgtgatctcgaagaattcactgatcaatagttccagccgttgggctttttgtaaagcaatctccgtgtaacgattccgcatcgcattggataattgtggttcttcttttagaagagtcagataacctatgacacttgtcagaggcgtccgcaaatcgtgggcgagataaacgatcaaatcatttttccgctgttccgcttctttagcggcacgttgatcttgcagacttttctcccgcagttgattcatttcctcttgaacatcaatcagatggctcgataaagtgatgcgtttggatggttcttctatcagttgagtcgtggcttggatcgtttcattcaaataaccgatggctttggtcatatagtaaatggtggtaccaaaccatatcagtaaagcgccaatcgcaacacaaaacaaccagcgatccgcaaaaaaacgtaagatatagtagataggttccgttccataccaagtccgggttccggcaataaagcgaatgactaatggaatcattacaaggaatgccagcaagattccagtggtgacgaagtattgggtcaagagctttcggatcaaaggatttctatttttcaatgatatagccgaccccccatacggttttgattaatttaggtttacgaggttcttcatgcaatttttctcttaaacgagcaatgtgtgccatgacagtattattgttatctaaatatttttctttccaaaccgcttcgaaaagtgtttcggaagagacgacggatccttggtgctcaaataaataaagcaatattttgaactcaatgggagtcaggaaaacttctttgccgtagagaatgcattgatgactgttgattttgagtatcaagccgtctttttcatattcttctactgttggagaagcagtggaatgattgtatcgctggtagcgccgcaattgggtttttacccgagccacaacttctaaaggattaaaaggtttggtgacatagtcatccgctcccaaactcaatccagtgattttgtctagatcctctcccttggcagtcagcatcaacactgggaaaaaatgggtcttgcggatctgctgtaacagttgaaaaccatcaatgtccggcaacatgacatctaaaacggccaaatcaatggcttctttttcaatataggcgatggcactagtaccatcataaaacggctgcacactaaatccttcgttttgcaaaaaggtcgtgactaagtccgcaatttctttttcatcatcaacaacgactattttttctgacatactctctcactccacctaaacatagtttcggattctcacatttccatacctccatcataccttacctggtaaacttatgcatcgttttctatttgatcctagcactgactcgtggaccgatccgacaaatcaactcattggttatagtttgtacttgctcggcagtatcgctccaatctgtcagaatttcaatttcactttcaattgggatcgtaggacaatggctcaagtctatcaaaagcatgtccatgcagatcaagccgatctgcggcaaggactgaccgcgataggaaagacaaaactcttgatttgatagagaacggggcagtccgtcacaatagccgatgctcacaacaccaacagttgtttcttgattcgcgacggcggtttgcccataaccgatcgcttcccctttggcaacgactcgcttagtgatcaactgtgctttgagggtcagaataggctgtaagcttactcgttgttttgtaggctcgttcgtatcactgagggatcctgtcaataaaatccccggacgcacataatcatagtttaagtctggataattcaaaataccataactgctttgtaagtgtgtgataccataagaaatctgtctctgatccaactctaggagaatctgatcgaagcaggcaatctgcttctgagtgcgaatcatactatcaggatttaagcgatctgccgaaccaagatgagaataaacaccactgatcgtcaagaagggcaaatcgaaaatcgaaagaatcgaatcgatagtcggtgttacacctaaccgatgcatcccagtatcgatggctaaatgacagtcaatcgctacttttctttgtgacaatgctacagcatgaccttcgctgatgatcgattgggtcaatgagtagcgacgaagttcttttatgcgttttggagaggtatatcccaagaccaagatggggcttttgacagcatttttccgcaatcgaataccttcatcaatcgtagccaccgcaaaaaaatcaattccggcttgttctaaaacaggagcaacttccttggcaccacagccgtaggcatcggctttaacgactgccatcacttttgttttcggtgagatgatccgctggatctcctgtagattatgcaaaagggctgtctttgagaattcttttacggcccttttaacgggcgttgtttgtttgtgtctaaaccatgagtgtttttgtcttaaaaagaggcaaatgaatccaatcgtcaagatcaaaacaaccaaatagttgattagattgttttgcagaatgctgattttttggctcaaaaagtgtgtgccggcaattgtataaggatgtaaaaggtaaagccacaaagatagctgtcctggatgcttccaagtcctgtggggatgccagcgcaagatcagcggaaataagaaaaagagtacaacaggcaagaagagatacatactgtcatgtttaggtatagaaaacccatgcaagtacgcactctcaataagcaatccgataagactgatcaaaaagaagagagctgttttggataaacttcttttctctgattgttttctgaccagcacacctaagcacaaaaacaatggtgtaaagaaaataccgttgcgggtaccatctaataggtggaacacagcagtatagaatggttcgattggtgtctgttggatcagtccaaaccaactatcaccacctaatccaatcaggtacaatccagccgcaagccagaacacttttttgaaggagacatgtatcagcaaacttgttaggagcaggctcccagtaatcaaagccggaaagtaccaaagatgataaagaatgccattgaccaaaagtacttgtactaatgttccaactggtagatcgaagccgatcgtttgactatagagtgctaatggtaaaaacattagtgtggctaatagatagacttttagctgttttttgataaagttgaatactcgttgtcgcgaaggataactattggccacagcaagttctgcaaacacatagtaaccactgatcataaaaaagaaaggaacagctactcgaaaaatcgtcaatgtgattaggatatcgccttctggccataaatagtgaaggggaagacaatggatcgcaaccaccatcatggctgcaatcacacgaaattgatcgattcctttatttttcatgcgaactgcctcactgtctgagccaagtaatcatggtattcttccagagtccatttttgggcagtgatgacttggctatggggaagcccgacataacgaaaatgccaaggttcataactgataccggtgatctcttgtttatcttccggatagcgtagaataaagccataattcatcatctgctgcataaataaatcagcagcagcactatctcgaaaatgagggcagataagatcatcatcttcttgtttctttagtcctacatcaatggccagaccgatttgatgttcactgcaacctggcaaagcaacgaattgtttggtataagctaacccgttttcttttagagaatactcccacaagcgtcgctgttctttttccgtacgatacccatctaccagacgaatgtccttttctagtccggttgctcgtacgagtcgttcccattgttttgccacttctggctgcaggtaaacatcgtgatcgctaaaaggagctagcactaagtgcgggggctcttgattttttttcaatggatggtttttattgatcaattgtaatgtgttcatcgtttgtcctcctctgccagtgcaatcaattgctctactaatatttcgtaggataacccgacttccgccatcatagctgggtagcgggagtgcccagtaaatcccggcatggtgttgatttcgtttaaataaatcgctccttgattggtgacgaaaaaatcgattcgagccagacccgtcaatcccaagtttcgataaagcagctgtgcctgctccttgatctgtgattcaagcgcgagaggcaatggtgctgggacagtgatcgtggcgctgattaattggtatttctcttcaaaatcaaaaaaaccgtcgacaagagaaatcgcatcacaagcaccaatcgtcaattgctcatttcctaagatgccgcagccaatttcaatacccgctatcgccttttggatcaacacagtagaaccgtaagcaaaagcagtcgttaatgcagattggagcgctgttttgtcagttacttttgtgatcccttttgaagaaccggcttcattcggcttgataaagatcgggaatccatggtcttgaataaaacgatcgattgtggcaggatcgttttcatagcgggataaaagcaaagtgggagcactagcgattcccatggtatcagcaagttgatgcaagagccatttgttcatacataatgcggaggcagcgacatggcaaccaacataaggcaggttcattagttcaagcagtccttggatacagccatcctcgccatacttcccatgcaagactggaaagaggacatcagggacgattcgtttttctcctaatataaatccttggctagaaaaagtcagctggtgacagtttttgtgatcttctagccaagtatcattgcgaacattcgcgaggtttccttgataccaataccaatccattgttggtgcgatgccaatggtcattacttcatatttcagcgggtcaatagcttggatcacacttgctgctgaggttagtgacactgagtattctggagaattccctccaaataaaacggcaatttttttcatcattttcttcctttccttttttcttttaaggttacattcagtgtacctaggaaaagaaaagaaaatttgcggtcttcctgttgtctttctcgtatttttatgatgaaaatctaacgattttatgacaaagggcttgaagaaagcaggggaagctattgttagtgatcaaatggacaacaactcttggtacagaagtgcgttgaaggaagagcacacgcatgcaggaaagcgtacaaaaaaggaaccgagctgaactattttcaacttggttcctctgtattcatacgttagttctttggcgtagtgtgatgtgcccaattgaggcagctatagctaaagaagatacagttaagtgtgcaacagtagctgatcatcttttagctcagtcccactattttgatggaagagtgccatcaaatccggtaccgttaaggattgtttttcctcacctgtgatatcgacaacgattttgccttgatggagcatgatcaagcgattgccgtaacggatggcatcttccatatcatgagtgaccataaatgccgtcaactgctgttcttgaatcaactgatcagtcagtgccatcacagtcatggaggttttcggatctaaagctgcagtatgttcgtctagcaggatcagtttaggctgttgcaaggtcgccatcaatagtgtgatcgcttgccgctgtcctccggaaagcagcccaatctcagtcgtcagtcgattttcaagaccaagattcaagcgagctaacttttctttgaagaaggcccgatgctttcctttgacaccggaggaaaacccgcgaacctggcctcttttataagcaagggctaagttttcttcgactgtcaaacgaacggctgtccccatccgcgggtcttggaagacacgactgatttctttggagcgtcgtgtgactgaatgacgtgtgatttctttgtcacctaagacgatcttaccttgttctgttgggatcgttccagcaatactattgagtaatgttgattttcctgcaccgtttccaccgataatcgtaatgaaatcaccgctgttcatagtgagatcgatcccgcgaaggacatgattttcgttgatggttcctttttcaaatgtttggtgtaaatcactgatcgttaaaacaggtgtcgtcatgattgacctcctttggttttcggaagaaatttttgcaatccaagtttcgttcgaatttgcggcaatgaaagacagataaccaaaacgatggcagaggcaagttttgaatctgaagcttccacgttgaattcaaagacgatggccaggattagacgatacaaaatcgcaccaatcacaatcgtgatcaaacgaacccacaaagatttattgctgaaaaggacttccgcgataatgatcgatgctaatccgatcacgatcgttcctacacctgagttaagatcagcaaaaccattgttttgagctaagagggaaccagaaagagcaatacagccattggaaatcatatagccaattagtttcatattgtccgtattaattccgttggcttcactcatcgcgagattgtctcccgttgctcgcactgctagtccaatctctgtgcggaagaagagaaacagcaacaaaatcacgacagcagcaaacaggaggcctgtacaaatgactgcggtatttttcgttaagcctagtgtttgaaaccaagtaaaaacagtatcttcccctaacaaggcaatattgggtgcccccatgatccgatttgtaatagaatacaatccagtcatggtaatgattcccgctaataatgcgggaattttaaatttggtatgcaagatccctgagacaaatccggcagctaaaccgccgcaaaagcccaacagacttgccgtaaaaggggaaaggccattggtgatgctgacagcagcaatgccggctcctaatggaaagcttccctcagctgtcaaatcggcaatatctaagattcggaaggtcaaataaaccccgatcgctaataatgcccacaacataccttgagaggcagctgattgaataagtatgaaaaatgtattgattaaattcataaggtttcctcaaatcatttttaggtttttagtttcaagttagttttcatcatttcatcatatagcagcaaaattatagtagatagtagatagtagcaaaattactcaggagccacgatgctttctggatcaattcctaatgcagttgccattttctggttcacaactagctctagtttattcgctgtttctacaggtgttgtagcgggcttttcatctccatcaagaatttttgcagccaattcacccgtttgtttgcctagtgacttgtaatcgatcccgaatgtagctaaagcgccatcttccacttgctcgacagaaccagcaacgatcggtgttttggtttctttggctacttcaccaacgactgccgcagcagaagcaaaggtattatctgttggcacgtagataccatccacatctttagctaaactagtagttacttgttggacatcatttgtcgtgtttgctgtcaagactttgacgtctacacctgcatctttcaatgctttttctgccaaatctgcttggatttttgaatttgcttctccagcattatacataataccgattgttttagcgtcagggacgatactcaataacaattgaatctgtttatcgatagggaccatgtcagatgtaccagtgatattgcgtccaggagcttcattggactccgctaattttgcttcaactaaatcagtgactgcagttacaacgatcggaatatctgttgtttcattcgccaatgagacagcagctggtgtcgcgatccctaagagaagatcaggagaattttttacaagtttttcgctcatactcttcagattgtcttggctgttttgggcattttggtattctaaagtaaggttttcgccttctttatagccgccttccgccaaaccttctttgaatccttcataggcagcatctaacgaaccatgttccaccagctgcaagataccaaccgtttttttgccatcttcagtggcattgttggtattcccgcatgccgcaagtccaagtcctaaggtagttgccaataggccagttgtgatccattttttcattttcatcaaatattcctcctaaaagtcttgatttaaacccaacggaacaaaaaaatccattcagacaatcgtctaaatggatttgaacttaccaaaattcagaaattcagtgcggccatttagaagattctctacatggctgctgttcacgttaaactgctctagccattatagatacaaacaaagtgttgtgaggtttgtatccacaatgttatgaatacaaactatctaaaatagctaaagtaagcaatattcagttgtggggatagcaataatttcatgattcttcctccaaacttgaattgttttcagtatagacgaaagttctgccatctgtcaattgaaaaacgcaatattctgaaaattttttttataacagataaagagatgtatgcaaatagtaaaataaaataaaaaagcagccagattaactaagctgctttgattaaataggtttagctttctttataataacggatcgtatttttaatttctcgaatactataaggaagatcatcagaaaaagcggcatcttgatcgatttccaatgaatcagtaaagatggcttcatattcctcaatacttaatttttgtcgctgatccaatagctgagtgtgggcttctttgtttaattgattttcataaccagctaccaaacgaccactgaaaaattcagaaacagccccagaaccataactaaaaagaccaatgcgatctcctgcgcttaaatgagacgaattttctaataacgaaatcagtcccaaatacagagagccggtatagagattgccgattctgcgactatagacgatggattcttcatagcgagccatcactcgttcctgctccgtttctacttcatcggcaaagactgctaacaatgcttttttccccatttttgtataaggaatatggaagctgattgcagcataatcgctgatgctggcttgattgcgttcacaatgagcttgccacacttttttgaaagaatcgatgtaaacttggttagatagatgcccatcgaccattggataagcgtggccgagaggacgccaaaaatcataaatatcttgagtcaacatcaaattgtcattttcaaaagttagaattcgtgggttagctgtaagcaacatggcaacagcacctgctccttgtgttggttcaccaccggaacgtaaaccataacgagcaatatcggacgcaatgactagaaccttgctttctggattggcttgaatatgggttttcgcaaattgaatccctgcggttgctccgtaacaagcctctttgatttcgaaagagcgggcgaaaggttggacgccaagcaatctgtgtaagactacagcagaggctttcgactcatcgattccagattctgtaccgacaatcaccatgtcgattgcctgcaaatcttcaggttctaagatttcttttgctgcactagccgcaaatgtaacgatatcgtgtgtttttttgctgactgccatttggtcttgaccgataccaatggtaaatttattaggatctacctcacgagcgtgagcgagatcaaccatgtctaaatagtaaggcggaacaaaaaaatttattttatcaataccaacgttcattatgacgctcctttgggtttaacttatgttataactatcgtttatacggtatcatatttttgtttaaaaatgaaaaaaattctattagaatttaaactttatttaagaatggctgattggaacagaatgcaaactcgtggggtattctttttttgtggaaataatgatatatttctgttggaggtggcatggtggaagaagttgttattatcgatgcacgaagaactcccatcggtaaataccatgggtcattaaagaaattttcagcagttgcattaggtactgctgtagcgaaagatatgtttgaacgaaatcaaaagatcaaggaagaaatcgcgcaagtgatcatcggcaatgtcctacaagcaggtaatggccaaaaccctgcccgacaagtggccctacaaagtggtctctcagtggacatcccggcatcaacgatcaatgaagtttgtggttctggattgaaagccattttaatgggaatggagcaaatccagttgggcaaagcgcaagttgttttagccggggggatcgaaagcatgacgaatgctccgtccctcagtcattacaataaagcagaagatacttacagtgtcccagtctcaagtatgacattagatggcttaacagatgcttttagtagtaagccaatgggcttgacagctgaaaatgtggcgcaacgctatggcatctcacgagaggctcaggaccagtttgcctatcagtcacaaatgaaagctgctaaagcgcaagcagagaataaatttgcgaaagagatcgttccgctggctggcgaaacaaaaacgatcaccgcagatgaagggatccgcagtcagaccacaatggaaaaactggcttctttaaaaccagtttttaaaactgacggtaccgtaactgctggaaatgcttctacgatcaatgatggtgcagcattggtgttgttagcatcaaaaacctactgtgaaacaaatgatattccgtatttagcgacgatcaaagagatcgttgaagtagggattgatcctgaaatcatggggatctcgcctatcaaggcaattcaaacacttcttcaaaatcaaaaagtttcattagaagacatcggtgtgtttgagatcaacgaagcatttgctgcatcttcgatcgtggtggagtctgaattgggattggatccagcaaaagtcaatcgctatggtggcggaatttctcttggacatgcgattggtgccacaggagcccgcttagcaacttctttggtctaccaaatgcaagagatccaagcccgttatgggattgcttctttatgtgttggtggcgggttagggctggctatgttgttggagcggccaacaattgaaaaagcaaagccgacggacaagaaattttatgagttgtcccccgctgagcggttacaagagcttgagaatcaacaaaaaatttctagtgaaacaaaacaacaactgtcacaaatgatgttagcggaagacacggcgaaccatttgattgagaaccaaatcagtgagatcgagctgccaatgggtgtaggcatgaatctgaaggtggacggcaaagcatatgtcgtaccaatggctacagaagaaccttctgtgattgcagcaatgagtaatggagccaaaatggctggtgagatccatacgcaaagcaaagaacgattgttgcggggacagattgttttttctgcaaagaatccaaatgagatcgagcaacggattgcggaaaaccaagctttgatttttgaacgggcagaacaaagctatccttcgatcgtcaaacgagaaggaggattgcggcgcatcgctctgcggcactttccagcagattctcagcaggaatctgctgatcagtcgacgtttttatcggtggatcttttcgtggatgtcaaggatgcgatgggagccaatatcatcaatgcgatcttagaaggcgttgccgcacttttcagagaatggtttcctaatgaagaaatcttatttagtattttaagcaatcttgctactgagtcattagtcacggctgtttgtgaagtaccgttttccgctttgagcaaaagaggtggcgccacggttgcacaaaaaattgttcaagcttctttgtttgccaaaacggatccttatcgagcagtcactcataataaaggcatcatgaatggggtggaggcagtgatgctggccactggaaatgatacccgggcagtttctgctgcctgccacggctatgcagcacgtactggcagctatcaaggactgactaattggaccatcgaatcagatcgattagtaggggaaatcacgttgccgttagctatcgctactgttggtggtgccacaaaggtcctaccaaaagcacaagcagcattggaaatcagtgatgttcactcttctcaagagttagctgcgctagctgcaagtgtgggacttgtccaaaacttggcagctttgcgggcgcttgtctcagaagggattcagaagggacatatgagtatgcaagctcgttcactagcgatcgctgttggagcggagaaagcggaaatcgagcaagtagctgaaaaactacggcaaaatcctccaatgaatcaacaacaagcgttacggtttttaggagaaattcgggaacaataaaaaacttgtttcaacggtagcaaatgctactgttgaaacaagtttttttgtcatagacaaattgatgagtgtttctagaagctgctaaagctcatctttttaagtacatcccaatacttttgggggctgtctccacaaagccaaactgctgataaagattttcagctggacaatcagcaatcaggttcacgtaagcttggggatctacttcattatgtatatggttcattatggcgctcatgattgattttgccaatccattgccttgatcttcaggaaggacagcgatgtctaggatttgataggcagtacctctgtcaccaatcaatcggcccatgccgaataaggtttgatcgctggttcttcgaacagtcactgcaaaaagactattgcttaaaccaatcttactcgcagctgttccacgaagagaaagaccgcaggcttttcgtagagttaggtattcagctacttcaggaactgtatgttttaggagatatttagaatcgttcatcatggtcctccttgatacagagtagagttgtttagtcctagggaatttgatcaataccctttagcagatggctttttggtaatgggcaaagacgtctttaaaagaaagagacgatgatagaaggattccaacaaatgaaacagccaaaccccaacagttgagctgttcgtttttttctatcatcgtctctttagcttaacgttcagttagtggggtattcgcatactcttcgatcaatggaatcacatccagcttcagtttgtacttacgagctaaggcaggttcaacagtgaattcgccaacttcagtcgctgatatagttgccaataggcgtttttctttcgctgtatcttcaaaaatctgcacattctcggcatttctttcaacagagaatttaggaaatgcagtcattttttcttcaaaagcggcaaaaccatccgttgtttccgctgcttccgtctgagattctgagactggttcggtagcagaggcttctggttgattgacagctgatgttgctggtaaccaataagcggcgatttcttccactagattatcactaaaacgatctaatagacctttttcttgtttttggattcgtttcacaacgattttgaaattctcgtctaaaggaactgcgattttttgttctttggtcgttgccgtttgcagttcaatcaacatttcctcacggtttttagggttgatataaacggtggtctctagtccaaaatttgcagctgtcttgtgttggatcgctgaaaataattgttgacgtgccatttcataagatggccgaaattgttgttttaacttggctaattgtttctttttcatattcttctcctctcaatcaatctcgattataaggaataatgacgaaaatgaacaggggttttcatgaaaaaatgaggaatttcttttgattatcagaaaaaatggcttttctttaaatgaaataaaagaaacagccaagatcatacccaatgagtaggggatgactttgactgtttctgagggcaacaacttacttctaaagatataccaggttcatcgcatagtgctcaaagcgtcgatttgctgatatttaggcatcaaaataaacgaatcatttttaccataggcgaccaagcaattttcccatagaaaaaagcttagcggcatcttcgctttttcagcaagcatttgctgatagtctgactgatcccactgacgtgcgggaaaatgttgaacgtagtcgggaaaaatcagaaatacaaaatcaggatgcaaggctcgcttgacggcagtgggcagttgatccaaacgtgtagaatccatcgggttttccctcattagaatcctgttgtatccggattagttgctttcccaacgactccatctagttggtcgattcgctgcatatcttcatcagaaagctcaaaatcaaagactgctaagttttcctcgatacgacttggtgtaacagatttaggcagcggcaagaaatcatgttgtaaagaccagcgaatcgcgatttgagcaatcgttttgccgtacttgtcagagagttcctgcatttcaggaacgtcaaagatctttcctgtgcctaaaggactgtaagcttccaataagacattgtgctcttggcaataagacactacttctttttgtaattcaccaggcgctaagaaaatctggttgaccattgggaaaatagtggctgtttttttcagttcttcgaaatgatgaggcaagaaattgctgacgccgatggctttgatcttcccagcttgataaagctcttccatcgcgcgccatgtttctgcatttgctgactgccaattgtcacggaatttcactggatttggccaatgaatcaagaaaagatcgatatagtcggtttgtaatttcttcaacgattcttcaaaggaagaaaggaccaagtcgtaagagtgattttcattccataattttgttgtcaaaaagatttcttctctaggaatgccactttctttaattgcttgtccaacactgtcttcatttttgtaaccttgcgcggtatcgatatgacggtaaccaacttccaatgcttttttgacagcagaaacagcaacgtcaccatttggtgtttgccaagtgccaaagccaagttcaggaatcgatacattgttcgataaagtataactgttcattttcattcctccatttctttgtttttagtttagcagagaagggatttttttccaatggaagatacttctgatcaaaataatgcacaaaaaagatgtaaaaaaacttgtgttttgaaccagtttttttgtacacttgagaaatggataaggagagagaatatggatatctatttaaagcgtgcgattatgcacattgtggatcgacaaacgggtgatcccgtatactcgcaagtggaattggatctgacaacggaatacatccgagattatttaacgaaaaaaattcaaaaattagcgacacctcagacaaagaccggccgcttgctggaggactctgagatggctagattcgtcaaacaagcgccggaagcatttgtagaaagcagtgaagcaatcctgcgacgctggtatgaagtttaccaacaaagtgaagatgcaccaagtgcggatgctttcattgttttgtatgaattagataccaaactgcaattagcatttttgaaggttaactatacagatggctacacgcactttatcgacagtactgaaacaggtatcgccaataatctgattttgcatcgagcacttttagctggcaaaacccaaaaagcagatgaaggaataacgatcgatgtcgagcagctgacttacgaattagtagagaaaaaatataccttctccggagaaaaatatttctatttctccacgaaagtgattgattctgaaccgctgccttctctagaagaaaatgtcaaagtcatcaaaaaggtagctgaaaaaattggtcaaaagtttgagaccccttcttatgatgtcatcgccgatgtcaaagaggctgtttacgatacaatagaagaaaatggtcagctgcatgtagattcgattgcccaaaaagtattcaaagataatattacggctcagatggcctttcaagaagaagtagcagaaaaagggtatatcgatcaagcccctatgctgcgagaggtcagagaaatttcagaaaaaaaatatggcaaacaaaagctaaaactttccaatggtatcgagttgatcgttccattggatgtctatcgagatcctaatttgatcgaattcatcaacaatcccgatggcacgatttctgtaaccatcaaaaatgtggaagaagtcatcaatcgcatataaaaatagctgccaggctcttctcaaggagtctctggcagctatttttatttattgttgagttgatccaaagcgggtttgggtacatcttcttgtgagacttcttcccaactgaggacacctttgcggggattgactaatagtttcagataagctccttctcgtaggggcttggagcggtgttcattcattttaacgatcttctcttcacctgattcattataagccgcttgttcatatttataaatatcttgagccacaccatcactggcaattgatgttgagtgggtaccgctggtagtgatttcggtgtagtaagcagtgccgccatagtaataacggtaggcaaagaaacagccgcctaagaaaacgccaaagacgatcaaactcgcaatgatttttttcattcctgttcacctcatatctattattctataaaaaagcagacccgtccaactattttatcaaaatcaaagcaaatcttagaaattttgaataaaaacggcgaacaatgaaggagacaatattcttgactttgactaaatttgacctataatagagataggtttaaacttacaaaaaataagtaagaaagaattttttacttttgtaaggaaaagtctataattgatagtagagccgatccaacggcgctacatctcatttaggagggaaattattatggcaaaacaacattatgatcgtagtaaaccacatgtaaacattggtacaattggacacgtggatcatgggaaaacgacactgactgctgccattacgacagttcttggtaaaaaaggactcgctaatccgcaagattacgcaagtattgatgcggctcctgaagaacgggaacgtggtatcacgatcaataccgctcacgttgaatatgaaacagaaaaacgtcactatgctcacattgatgctccaggacacgcggattatgttaaaaatatgattaccggtgctgcccaaatggatggtgcgattttagttgtatccgcaacagatggtccaatgcctcaaactcgggaacatatcttgctttcgagacaagttggtgtgaaacatctgattgttttcttgaacaaaatcgatttagtcgatgacgaagaattgatcgatttagtggaaatggaagtaagagaactactatctgaatataattttccaggtgatgacattcctgttatcaaaggttcggcattaaaagcgttggaaggagaccctgatgcagaagctgccatcatggaattaatggatacagtagatagctatatcccaacaccagagcgggatacagacaaaccattactcttaccagttgaagatgtcttttcgattactggacgaggaacagttgcctccggacggatcgatcggggaacagttcgggtaggcgatgaagtagaaatcgtcggtatcaaacctgaaactcaaaaagctgtagtgacaggcgtcgaaatgttccgcaagacgatggactttggggaagccggcgacaatgtaggtgtcttgctaagagggatcactcgtgacgaaatcgaacgcggacaagtattggctaaaccaggttcgatcacaccacatacaaaattccaagcagaagtttatgtattgacgaaagaagaaggtggtcgtcatacaccattcttcaacaactatcgtccacaattttatttccgtacaacggatgtgacagggaacattacattgcctgaaggaacagaaatggtgatgccaggtgacaacgtgaccatcgatgtggaattgattcatccaatcgccgttgaaaatggaacgacgttctctattcgtgaaggtggccgcacagttggttccggtatcgttactgaaatcgaaaaataaatcagtgtttcaacaaaaatgaagcagtgactagagccttttaggacagtcactgtttctttttctaaatttctttgtgattttattaaggattttagatgatggaaaacaaacctagtcagcaaataagtttcatagtaggatagaagctgacactaaaaagataggatgtttttccatgagaaaactgcgacgattttttatttttatagcaaaaatagctggagtcctgttgcttatcggcggactgtttttaggctataaaaattatacagctctaaagaaagtgtattcttatgaagaaacaatcgctgagcaaacagaaaaatatggcatcagcgactatcaggaattagcgatgagtattatgttgactgaatcaaaaggggaaggaaacgacccgatgcaaagctcagagagtgcttacgggaaacaaaatcaatttgaaaatgcccaagacagtatcgagcagggagtggcttatctggctaaactgatcaaaaaatctgttgacatggactgtgatctgtggaccgccgttcaagcctataattttgggacagactatattgattatgtagccaagaatggtggcgaaaatacgctagaactggcagagtcctattcaaaagaagtgctttctcctttgttaggaaatgataatgagcaaacctatcgttactgggggtggcagtcgatcacttataatggcggttatttgtatcacaatggtggcaatttattttatgcagatgtggtaaaattcaatcaatggaagataaaaatgggtagtattttgttttcttgaaagtctctgaaatcaagcaggtaaaagacttgaaaaaacaataaaatatgatagaatcaatatgagtgattctgtctaattattcgtcgcactgattctgattggtgcgattttttacctaatgaatacgggaatacttaccgaatggaggtgagtggatggcacgaatacctcaaacggtcattgatgatattcgagaacgaagcaatatcgttgatatcgttggtcagtacgtccagttgaagaaatctgggaaaaactattttggattatgtcccttccacaacgaaaagtcaccttctttttctgtggcagaagacaagcagatctaccattgttttggctgtggccgcggaggcaatgtctttggttttttgcaagagttagaaggattaagttttccagaatctgttttgaaagttgcagaaatcagtgatatccctttagatgagcaatacaagcaaaccgaagcaattgatgcaacctcttctcagcaaaatcaattgatcgcgttgcatgaaaaagctgctgaagtctatcatcacatgttagtcaatacggctgccgggcaaggcgcattggattatttgctggaacgcggattgacgatggcactgattgacgaatttcagattggttttgcgcctaacgagcgtgcctttttggaaaaagtttttttgaatgaaaaagcaaatgcggcattttttgcggatacaggtctctttgtacaaaggaacgatgggcaacttgctgaccgtttttatcaaagaatcatgtttccgattcggaaccctcaaggaaagaccatcggtttttctggacgctggtttcaaacggaacaggatgatagcaaagaccagcccaagtatttgaacagtccggaaacaatgcttttcaataagcgtgaagtacttttcaactttgataaagcccggcgatcaatccgaaaagaaggccaagtctttctatttgaaggctttatggatgtaatcgcagcgtggcaatcaggaattgagaacgggatcgcttcaatgggaactagtttgacgaaccagcagattgccaatattgaacgtgtcgctacagaagtcatcctttgctatgatggtgaccaggcaggaatcaatgcaacgaatcgcgggattgatcttttacaagaacatagccgcgtgaatctctccgtcgttcgagtccctgaacgtctggacccggatgattatgtgcgaaagtatggtacagaggcctttttcaaactggccatgcatggcagagaaacggtgtttgcattcaaaatggactttcatcgtgccaatcgcaatttggccaatgaaaaagaacagatcgattatgtccaagaggtcttgcaagaattacagcatgtagattctttgctagaacaagaccgatacttgacacaactttcaactgaatttcatattagtcgagaaacactacagacgcaattgcgtcagttaaaacagacgcagccgaccccaacgccttcaccgccagttcgtgaagcagtgagtgtagcaccaccgccaccacgacagcaacggaaaactcaggtagaaaaggcggaggaattactgttatatcgtctgttccatgacaatacgctgaatcctcgttttaaaagtaccggtgttgcgtttattcatgataaataccaacaaatctattttttatacgatgcgtatatggaaaccgaagagcaatttatcctagcaaaattcttggattttttgaaagatgaacaaatgaaacaacaagtgatcgagatcgctgatatcaaggcttctgaagaggggacggaacaagaattccaagaccttctgcaggtatttcgtaagtcgggcattgctgaagaaatcaatcaaaaacgaatccagcagcaagaagcacgacaaaaaggaaaccagcaattagagttggaattagcaattgcgatcattgatttgaccaaacggttgaaacaagctaaatagcgaactgaaaggggctttctttcatggcagaagaaacaaagaaaacatatgacaaagctgttgccgaatttatcaaagaaaacaaaccaaaaggacaagtcgtttatgacgaactaaccaatcatttagcgaccccttattctttagatgcagacgcaatggacaagctgatccaaaaactggaagactcagggatcagtgtagtagatgagaatggggagccttccgttcatagtttgaagagcaatgaaaagcagcaagcaacgcaaccacaagaagatctttccgctcctacgggtgtcaagatcaatgatccggtacggatgtatttgaaagaaatcggacgcgtacccttattgactgccgaagaagaagtagcccttgctttaaaaatcgaagaaggcgaccaagaagcgaaacaacggttagctgaagccaacttacgtctcgttgtaagtattgcgaaacgttacgttggtcgggggatgcagtttttggacttgatccaagaaggaaacatgggcttgatgaaagctgttgaaaaattcgattaccgcaaaggattcaagttctcgacttatgccacttggtggattcgtcaagcaatcactcgtgctattgccgaccaagcacggacgattcggattccagtccatatggtggaaacaatcaataaattgattcgaatccaacggcaattactgcaagatctaggtcgcgaaccgacaccggaagaaatcggagcagaaatggatctgccaactgaaaaagtacgtgaaatcttgaaaatcgcacaagagccagtttcattggaaacaccgatcggtgaagaggatgattcccatctaggcgattttatcgaagatcaagatgcgacaagtcccgccgaacatgcagcctacgaattgttgaaagaacaactggaagacgtactagatacgttgaccgatcgtgaagaaaatgttttgcgattgcgttttggtatcgatgatggtcggacacgtactttagaagaagtcggaaaagtttttggtgtaacgagagaacggattcgtcagatcgaagcaaaagcgttacgtaaattacgccatccatcccgctcaaaacaattaaaagattttctagaataaaactgagaccacaaagacttttccaagaagtatgcttggagaagtctttttcttgtggtttagccaactttcgtaggaaaagtaatgaacttaataaaaacgtaacgaagcaagtgttggctaattgctttgaatatgataaatttaattttgtgaatcatttacacgaaggtgaatcattttggtacagagagttttttcaccaaagccagtgaataaagggcaagtctataagtgtgatattctgtagtaaaatgaaacctttcaacgatgaacagatacctgccgaagcaggttcaaaataaaaggagcaaattcgaacaaatgatgaaaacatgtcctcaatgtggatttgaatcaattgatgcacaaaagaaatgtctaaactgcggctttgagtttgttaaagcggatgaggcaaatgaaaaagaagcccctcatacgaatgagacggtatccgaaaagaatccgcagcaaaatgatgatatccgctggtctgattttaaggatgttcccttaggtgaattaattgaacatttcgaagacaagaatgaaactgatgagtcaaagaacaatcagtcagaagacgacgtaaacgtgcaagagctgataacgaacccaaatatagaacagacacccgtttcaaaagaaacgctatcagatgcgtccgaaacgatcgaatcacagtcacttgaatatcagtcagcagaacaatcgatgcacagtggaaatgaaagcaatgaagtgtctggatcagacaaaggaatccaatcgatcgcagaaagttccgcagagcccaatgatttagtagattcagccgaggtccctgaagatcacgattcggctattttatctgcttatattcgtcaacataaaaattcagagatggatgaagatgcgacagatgttccagtgataccggaagtcacggacgataaagaggctcttcctctaacggaggaacaatctcaatctggattagaagatgaacaaactgatactgcagcgattgctgaatcttcagaaagccctcaatcaacagagagtccgcaaccgaaaattgaagcagaagaaacaaagcttgccgaaattccagaaaaaacagcggtatctgaaaatacgaagagtaaaaccgatccactgcccaaaaataaaaagtcacgcaaaaaattctatgtagcggctgcggcgttggtacttgtttctgcaggtggctggtattattacgaagagaccgctcgtcaagaacaaattgcgacagcaagtgagctggaccagatcgaagcggatctagccgatttttataccgacgataaccaaggatttatcaaagcagacaaaacaactatgcaattgacggcattgactgatcgactagccaagtataaaacggaaagccgttacccggacttgttggctcagtctgaaacaatcaaagaaaagatggcgactctttcggaaatcaatgggtatttcactagtccagtgatcattgaagatcaattgcagaaggtttccttaaaagagccttcggcagtgactatgtcaaaaagaacagctgaaacaccattcgatcaattagtaaatcgggcgattgatcaagggcaaaaagagtatgcccagatcgaagaagtacgaaatgcagtcaaaagcatggttgctttgaataaagagggtgaactttctgacaaagtcacgcgaaaaagctacaatgatttagtgaagaagatcgatgcattgccgattgcttctttaaaagagcaattgactgctgagatagcaccgattgattctgcactgaagaaaaaagaagctgccgagaaggctgctaaagagaaggcggcccaagaagcagctcaggcacaagcggaaaaagccgccgcagctcaagaaacaactacggctaacaatagccagtcttctgaagctgattatgtattatcgccgaatacaccaacgaataccaataatcaaccaatcattccagcacgtgaaagtgatttggcagactctagcaatccggcttggaattgggcgcctggtgtccaagaaaagatcattgcaaccgcaattgctcgcggctatgtcgttgaagggggttatacctttgagcgcgtacgaatcgtgaatggagaaggttactataatttttatgcgaccaacaaccaaggctccttgttgaaaggaaccggtgattccgcttttccaatgtatctctttacagtgaatgccaaaaccgggtatttccgtggaaatggaaatgatcatacgattcggtgatgggtgacacttagaaaattttcagcataattacattattgaatcaaaaaacagcttgtttctcctccggcttttcgatatgatggatgataatcaatcggaaacggaggtttttttgttgcagaaaattgaaagatatgaacagttcagtgatggagttattgcctgtattccaacgattctgggttatctaggcattggttttgcaatgggagtcgtggggaaaggaatcggcttgacggtcattgaagtcctcttgatgtcgatcattgtctatgctggaagtgcccagtttatcatctgtgcccttttggctattcaagcaccgtttacttcgatcgttgcgacagttttcttagtaaacttacgccactttttgatgagtttatcggtagcaccttatttccgttctgcttcattagtgtcaggaattggcatcggcacattgctgacagacgaatcctatggagttttaacgacagctttgcaacaaaacaaaccaatcactacccgatggactcacggattgaatgtcatggcctatttaagttggatctttgccactttcttaggagcgttgttagggtcatatattcctgatcctgaagcattaggactggactttgcactagtggctatgtttgttggcttattcctttttcaagtagagttgcctttaaaaaagaagaccaagcagacggtgctggtgctagccgctgtggtaatttcattggtcctttttatgcgaatttcaacagctgaagtagccgtgattgctgccactttgattggatgtttgatagggacggtgacacatcatgattgattttgttatactgatgatagcttgtggtgtcgttacttggatacctcgggtgctgccgtttttattttcgaagaaattagtttttcctgaaaaattcacgatctttctaagctacttacccctttgtattcttggggcgctgcttgttcaaaatctgttggtttttcgtgaaggacaatttccattgcttaaagtcaaagaaaccgttgcttgtttaccagcgctagtggtcggttattatacaaaagatttgatgaagatcgttgttacaggtgtcatcacgatggcggcgattcgattctttttctagtaaatcatttctaaggagagaaaaaatgaaagacttattggcatccgtttttagcggattgatcattgatgagaatgatcaaaattactttgtacaaaaaaatggtctgacttttcgcttatcaaaagcagaaggagagcaccatcttggagaagctgtggagggctttggttatcagaatcaaaaacaagaactcgtaatcactacggagattcctaaaagccgccaaggacattatgctttcggaactgtcacggacagtcgtcgagatttaggcgtttttgtcgatattgggctcaaagataaagatatggtggtatcattagatgaattaccaacaatgcgggaactttggccaaagaaaggcgatcgcttgatggtcagcttgacggtggatgaaaaggatcgaatctgggcttctttagcggatgaaaagatttttaaagcattgagtaaacgtggttcagagacgttgaagaatgctgacattacagggacagtctatcgcttgaaacttgcgggaacttacttgctcacggatgatttctacattggctttatccatccttccgaaagataccaagaaccacgtttaggagaagttgtctcaggacgagtaattggtgttcgcccggatggtgttctgaatttatcattgaagcctcgtgcttatgaagcaatttcaaatgatgctgctatgatcatgacattcttggatcgatctgcagatcatcgtattccttttactgataaatcgacaccagaagagattctgcagacattcggtatcagtaaaggccaattcaagcgggcgatcggtaccttgatgaaacagcgtttagtggaacaaaaagacggcttcaccatcaaagtcaaaaaatccaattgagaatgcttgtatcttttctcattctaatttataatgattacaatattatctaagagttgacgtctcttagattagaatcgttataaattagcgatgtatggaggcctgtatgaatacaactgctgctttaaagaagacaaaaaaacaacttcatgaatcaggatttaaattgactccacaacgagaagctaccttgttggttcttttggagaatgagaaagatcatttatctgcagaagaaattttcttttttgtgcgcaaaaaaagtccagaaattggactagctacagtgtatcgtacattagaaatcttaactgatctaaaaatcgtggacaaggtgagtttcaatgatggtgtttctcgttacgatctgcgcaaagaaggagcaaagcatttccatcaccatttgctttgtttagagtgtggcagtatcgaagaagtagaagaagatctgctgacaggtgtcgaagacatcgtagagaaaaaataccattttctagtaaaagaccaccgattgacttttcatggagtgtgtcagaagtgtcagacaaaaaatgcagcgaagttgagtgaagcgtaattgctcctcagctttttttgtggttgaactactatcatatcaagctttaatttgttatgataaagaggttgaaagtaggggggacgtgtatgaaagaacagatcatcgattatttgcattatctgacgattgagcgggggctatcccaaaatacccgtaaaagttatgagcgcgacctagagcagtaccttacatttttgacggaacagcacatcaaagattggcaggcggtggatcgtgtcttgatcctctcttttttgcagcaattgcagcaatcagggaaatcctcggcgaccattattcgaatggtatcaagcttgagaaggtttcatcaatttctccgtcaagaacgctttacggatcatgatcctatgcagcacatcgattccccaaaaaaacaacagaaactgcctgatacattgagcctttctgaggttgagcgcttgatcgagacaccggataccaaagaagtgttgggaatccgcgatcgtgcgattttagaagtgatgtatgctaccggccttcgggtcagtgaactgatcgggttgcaactgaaagaccttcatttaagcatgggtctgttgcagacgacagggaaaggtgacaaggaacgaatcgttcctttaggagatctggcgattcagtggatcgaaacttacttggaagaagcacgcccttttttgactcggaaacatccagaagagagtcatctttttgtcaataatcatggaaaacaactttctcgtcaaggaatctggaaaaacttaaaggccctcgtgcgcaaggcaggcattacaaaaaatgtgacgccacatacgctaaggcatagttttgccacccatttattggaaaatggtgccgatttgcgtaccgttcaagaattattagggcatgcagatatatccacgacacagatctatactcatattacgaaaaaaaggatgacggaagtgtataagcagcactttcctcgtgcctagaaatagaggaagacatggaagaaatcaatatcaaactagatgtctttgagggaccgttggatctgttgctgcatctgatccaaaaattggagatcgatgtctatgatattccaattgcagcgatcaccgaacaatatatgcaatatattcatgcaatgaaaagtttagagttagaggttgccggagaatacttggtgatggctgctacactgatggcaatcaaaagccagatgctgctgccaaaacaagagatcttgattgaagaaaacgatccttatgaagaagatccaagggatatgctggttgctcagctattggaataccgtaaatacaaatacgcagccgaacaattatccgaaaaagcggaagaacgaagtttatactttacgaaagatccgatggatgtcgatgcctataaagaaaaaagtgatgaattggcagccaaccggttcaacacgatcgatttattcttggcttttcataaaatgcttgaaaagaaaaagagtcggaaagtactggagacaaagatcacaccagatgaaagtaccattgatgaaaaaatggcgacgatccaattggaaatgcagcaacgaaatgccaaaaagggacgacgttttgattcttttttcaccaattacagcaaaacagaagtcgttaccactttcatggcattattagaattaatgaaaaaaggatatattcgagtagagcaagaaggaaactatgaatcgatcttgctttacccagcaggtaaaacagatgagtaaatatagtgaaatagaagcgattctctttgtcgtaggagatgaagggatcggattagaagaattaagctacttagtcaatagcaaaactgcggctgtctatcagtacttgcaagaattgaatcagcgttatgaagaaaatgaagattcagccttgcatattttagaagttgggaatcattttgttttgtccacaaagaaagaagtcgcaccgttattaaagaaatacgcagaatcgccaatgggcaactctctttcgcaagctgcgttagagacattgtcgatcattgcctacaagcaaccgatcacacgaatcgaagtagaagagattcgtggggtccagtccagcggctccgtacagaaattagtcgcaaaacgattgatcgaggaaaaaggccgtgttgatggaccaggtcgagcaattttatatggaaccactgaatacttcatggattactttggcctaaaatcattagccgaattacctgatattcaagcaatggaagacgaactcgaagaagatggaccagtggatcttttttatgatcgttacaaacaagaaggagactcataatggaacgtttgcaaaaagtaatcgcacatgctggaatcacttctcgcagaaaagcagaagagttgattgtggcaggtcgtgtcagtgtcaatggtcaaattgttaaggaactaggagtacaggtgagtgctaaagatcgcgtggaagttgacggtgtcccaattgaacaagaatcgcccgtctactatatgctctataaaccacgtggcgtaatctcagcagtaactgacgataaaaaaaggaaagttgttttagacttttttactgacgttccagaacgtctctacccaatcggacgattggattatgatacttcaggtttattattgctgaccaatgacggcgatctttcacaaaaactgatgcatccaaaacatgaagtggataaagtctatgtggcaaaagtgaaaggaatcgctgataaaaaacaactattgcccttgtctagaggaattcggatcgaaggcaagaaaaccgcacctgctcgctttgagattttgtcgacagacgctgctactcaaacaagtatcgtccaattgacgattcatgaaggccgtaatcatcaagtgaaaaatatgcttaaagcagttggtttaccggtccaaaaattgaaacgggaaatgtatggttcgttgacattagctgggttgcgccctggagagtatcgggagttgacgaaaaaagaagtcaatgaattaaaaaaacaagtgaaataaccagcacacagcaaaagatgcttaaaaaatttgtcaatcgagaatttttgtgtataatgaaacatgtattataaataaaaggttcgtcttcaggggcagggtgcaattcccgaccggtggtgatagtccacgacctacttcttttgaagtagctgaatcggtgaaattccgataccgacagtaaagtctggataaagaagatagagcgtatttgatttgcctatggtttttcaaatgccctctttttccctgtggaaaagagggcattttttactttgtctggcgccgacaagtaaggaatcaaggaaatttaataggttcgtttgaagaggaatcctgaacttaggaggatttgtattaatgaacaacaaaacaagaaaaatggtaacaatagcaatgtgtgcagcaatgggaacagtcttacagtttattgcgtttcccatcatcccggcgtttagctttttgaaaatcgattttagcgatattccagtaatgatcgtcatgtttttattcggtccttttgctggcgtggcaaccgcgtttctacgttctctcttacacttgtttctatctggtttttcaccagcagatctcgtgggagacacggcaagtttcttggcatcctgtgtcttcactttgccaatgtactactttttccgtaaagggatccatgcgaaaaataaattcgtgggagtggtcacaggaatcctcgcattaactgcttttatgagtattgccaatctatatgtcatcacaccattgtacctgcgcttctttggtgttacagcagatcaattccttggcatgtcattagcgcgttatgtcagcatcggtattattccttttaacttgatcaaaggagttatcgtcagtggggtcttcttgatccttcatgcgaagttgttgccttggttggctcgtaaacaaccgcaacattcaccagttggaaaataataaaaaagatcgtatgttgcttttgagcaaacgcgatctttttatttttctaacagtatcgcccgagtaggacactttttatatgcagctaagactttttcttgctgatcttctatgataaactgttgccgagcggctggttcttgagcaaataagacgataccatcttcatcataatcaaaaatatcaggggcacagaccgcacataatccacaagcgatacagcgctcaggaatgattttgcagcgttgagacatggaattgtttcctttctggaggtaagtatagacatatggatgcttttattttagcgttgtttcatcattctgacaagttgcgtccgtcaaccatttatcaaatactttacggcaaacgaacgagttcagtattgagttatgcttttttttatgatcgcttaggttactttcaagcaatgccgaatcttgaagaggatgaatttaataaaagaatcacggcgctgattgctgccaaacaacttgtagcagatgaaaaagggtttctccagacagttgcacctgcaacgcttactgaagtagagacactctgccgtcatttaaattattttcaattcggtcgccggggggaacagatgtggcgcttggtacagctgcttgttcaagcggctgcttttcaagaaatcagtaatcgatatattcctgtggagaacactcctatgttcacagaaccggttcggcagctgattcggcagcacccaaaattgaagcaggcgttgtttactgagctttggacagtcttcgagcagattccgggagaatttgccgactttttggcagggacgttgacaggacctgagcaaattggtcagactttttttcagctgttaccagataactaccaaaaaatgccttggaatcagttttttccagcggcagcgatccactgctttttatcagtggcaaagaagcaatctcctcttttagcagcagggttaaacccgttttatcaagaaaacctcaaccaaagcatgctgaagacccgtcgcttatttctcagcgggaagtcgattgaggaaatcatggcacttagacagatcaagcgaggaacagtcaacgatcacttgattgaatgggcgatcatcgatgatcagtttccttatcactattttgccacaaagcagcagttccctccattgtcatggaaattaccttatcacattcttcaaaaagaagtgccgctggattttttaagtatccgaatcaatcaaattgcacaaaagcgagggatcctatgttagaacaggcgctcaaacactattttggtcattcccattttcggacaggtcaaaaagaagtgatccaatcggttctgaatcatcaggatacattagcaatcatgcccactggtaacggcaaaagcttatgctatcaactgccgggttatttgctggaagggttggtagtaatcgtatcaccattgctttctttgatggaagatcaagtgtatagtttgcaaaaaaatggtgagagacgagcgatcgcttttaacagtctcttatcattcgctgaacgaaaatttgttcttagccatctacagcagtataaatttttatttattagtcccgagatgcttgttcaaaagacgattctccaagcattggcaaatagtagaatcgcattgctggtcgtagatgaggcacactgtgtttctcagtgggggatcgattttcgaccagaataccttcagctagctgcggtcaaacaacaattaaaagcaccaacgactctggctttgactgccacggcaaccgaacaggtggcacgagatattcaacaaaaccttttaggaaaaacgcatcaagtttttcgctatggaatggatcgcaaaaatattggactgatcgttgataaaagcggcgaagaaaaagacacgcttttaatgcattacttgcagcaattgtcaggggcgggaattatttattgtgccactagaaacaaggtggaagaactttatcaaaaattacgcggcaagtattctgtggggtattatcacggtggattagccagtgatcagcgtaaagtccttcagcagcagtttagtcggaacgagctgcagttattgatcgccacaaatgcttttggaatggggatcaataaacaagatattcgctttgtgatccattatgatctgccggattcgttagaaaactatagtcaagaaattggccgagcaggtcgagatggcaagcaaagctatgcgatcttactctatcgtcctggagacgaaaccatccattatttctttcaaaaggaactaagtgcagaaagagaacagctggaaatgacgccgcaatctttgatgctttccccattgcaggaaaaatggcaagcaaaaatcaatgagcatggtgccaacaaatggtttgctattttaaagcaaaatgagtgggaaaaaaagcagcagctaaaaacgatgctcgaatacattcactgtactagttgtcgacggtgttttttattggctcattttgacgaagaaaaacaaccgcttgaccagtgttgtgatatcgatggtattgaaattcggcttgaccaaaaggaattcaagccgcaaagaaagaactcgtggcaggaacgtttactaaaaatttttaaagaaacaaattgaatcgttttttaaaagacagttcgattcaagctatgttataatacatcggaaggatattaggaggtaatacgagtgagcaagaaagacaaaaactataattcagaaaatcaagagccgtgggaacaaccaatttatgatacagaatatgaagattctgcctcacgatcacaacagcggaaacaaaaacgcgggaattcactctttttgacgatcgtcttagttttacttttcttgatcgttgcaattcctgttggcgcggggatttgggtcttaaaccgctcaaatgatacagcaactgttgcctcatcaacaagtagcagtacagttgccagcacagaatcatcgactgttgagtcatcgacaaaagtcagtgaatcatctacttccagcagtagttcgtcatcgtcatcatcatcttcttcctcatctgaaagcagtgagtctgaagagccagcgaacagtgaagcagaaggaaacaacacccagaacaatcagggaaatgcagaccaaggaacgacgaatcaaggtgcagcgaatcagggagaaaccaaccaaggaacagagcaatatacgactgttcaagctggtgaaggtccagaacaagtagcagcacgtacaggtatttctgtcgagactttgtatcaattaaacgggatcgatccaagtaatttcatgctttacccaggcgatacattacgaattaaataaaaaaccgctttggcggttttttttcttgaaagttaaaaggccgttgatcggtagttgtttagaaggagtaacaaatgaaaaaaatcaatattgccatcgatggtccagcttcatcgggcaaaagtacagtggcaaaaattttagctcagcattatggatatgtttatacggatacaggggcaatgtaccgtagtatcacttatttagctcttaaaacagggtgctcattagaagatgaaagcgggcttgtggcattaatcgatacttatccaatcacttttgcgccaactgagacaggacaagatgtttttgtagatggaacaaaagtgacagaagagattcgccagcccgaggtaaccaacgctgtttccaaagtttctgcttatcaaaaagtccgggaaaaactggtccaacagcaacaaaaaattgctgaaaatggcggtgttgtaatggacggccgcgacattggcaccgcagtcttacctcaagcggaagtaaaggtttttctcgtggcgagtgtagaagaacgagcagaaagaagatacaaagagaaccagcaaaaaggaatcaccacctcctttgacacattaaaaaaagaaatcgagcaaagggattatttagattctcatcgagaaatctctcccttgaaacaagccgatgatgcagttcgcattgatacaacaggaatgtccattacagaagtcgttgcagcgattcagcaaatcgttgatcaaaaaatggaataatcaaccactggcgctagtcgacctaaaaaaacagaaccgaacgattctcatgagaaatttcattaaatatcggaattttcgcgtagaaatattgttcgaactctggggttttttaggtcggaggggctatttttttttgtatgaaacagtgattttgaagcaaaatagtgaaggaaacgttttttgagaacaattattgacagttttttgtgaaaataagcgaaatcgctttatttttttggcattctaatttaaactaagggatgtagtgcatttacgtacaattgttggttaggaggacacaagacatgacagaatttgaaaataatcaagtggagaatgggaatgaatcaatggaagctgctttggataacttccaagaagtgaacgttggcgatattgtcaaaggtgaagttttagccatcgaagacaaacaagcgatcgttggcatcgaaggagcaggtgtagaaggagtcgttccagcaaaagaattgtctacattgcctgttgaggatatcaatgaagtagtcaaagtgggcgatgttttagagttagttgttatttctgcaatcggtaaagataaagaaaacggcagctatctactttcaaaacgtcgtttagacgcgaagaaagtttgggaagatatcgaaaaagatttccaagcaggtaagatcattgaagcgcctgtaacaaatgtagtcaaaggtggcttagttgttgatgttggcgtacgcggatttgtgccagcttcgatggttgaggaccactttgtagctgattttgaagattataaaggcaagacactcacctttaagattgttgagatcgaaccttctgagaaccgcttgattttatcccataaagcagtggttgaggctgaaaaagagaaacaaaaagaagccttgctagctgatctttatgaaggtcaagaaatcgaagggaaagttgcacgattgaccgattttggggctttcgttgacttgggtggaattgatggtttagtacacgtttcagaaatttctcatgcccatgtaggcaaaccgagtgatgttttatctgttggtgatactgtcaatgtccgtgtcttatccgttgatccaaataaagaacgcgtatcgttatcgatcaaagatacattgcctggaccttggagcaatatcgaagaacaagcacccgttggtagtgttttagatggtgtagtaaaacgactaactagttttggtgcttttgtggaagtcttccctggtgtagaaggattgatccacatttcgcaaatctcacataaacatattgcaacgcctcatgaagtgttgcatgaaggtgatcaagtgcaagtgaaagttcttgaagtgaatccaaccgatcatcggattgctttgagcatcaaagcactagaaaaagccgaggaagcggaagaagcgcctgcagaagatgactatgaattaccagaagaatccactggttttaccatgggtgatatcttgggcgatgcgttgaaagataacgacgaagaataatctagcctagcagcttataacgattcgttttttgaatttgttataagctgcttttttgtttgtcatcaacacttgcaagttagtgatgcattaggtaaactaagaaagattgaaaagcagaagcagctgtattcagcagtttgcttcttataaatggagggtaaaaaatgtcaaatccaacaattgcgatcgtcggacgtccgaatgtcgggaaatcgactattttcaaccggattgccggagaacgaatctcgatcgttgaggatactccgggtgtgacgagagaccgaatttatgcaacaggtgaatggttaggtcgagagttcagtattatcgatacaggtggaatcgacttaggcgatgagccgtttatggatcaaatcaaacatcaagcagaaattgcgatcgatgaagcagatgtgatcgtcttcattacgagtgccagagaaggtgtgacggatgcagatgaacttgttgctcgccttttgtataagagcaataagcctgtgattctagcggtcaataaagtcgacaatccagaaatgcgtgcagatatttatgaattctatacattaggattaggtgatccgtatccaatatccggcagtcatggattagggatcggagatgtgcttgatgaagccgttaagcattttacagaagaagcagaggaagaggatgaatcgatcatcaaatttagtttgattgggcgaccaaatgttgggaaatcttcgttaatcaatgcgattttaggtgaagaacgtgtcatcgtttcggatatcgaaggaacgacccgggatgcgatcgatactcattttacaagtgaaaatgggcaagagttcactatgattgatactgcaggaatgcgtaaaaaaggaaaagtttacgaatcaacagagaaatacagtgtcatgcgagcgatgcgtgccatcgaacgttccgatgtggttctaatggtcttgaatgcggaagaaggaatacgtgaacaggacaaacgaatcgctggctatgctcatgaagctggccgtgggatcatcctagttgtcaataaatgggatctgctaaaaaaagaaaccaataccatgcgagactttgaagcggagattcgtgatgagtttcaatacttagattatgccccaatcatctttgtatcagcggcaacgaaacagcggttgaatcagttgccagctttgatcgaagaagtcagcatgaatcaaaacatgcgtatcccttctgcattattgaatgatgtgatcatggatgcagtagccatcaatccaacgccaacggataaaggaaaacgattgaagattttttatgcgacacaagttgcggtcaagccaccaacatttgttatttttgttaatgaagaagagttgatgcatttttcttatgcgcgctttttagagaatcagatccggaaagcatttacttttgaaggaactccgattcgaatcattccaagaagacgaaagtagcgattttatcatactttgctgcttttgacaaagaattctattcttttgacagaaaaacgataaatcctaaaaaaaacagtagtaaaaacgttaaaatccttgatattacaacgttcttatgataacgttatatcagaatattgatggatatcaatatttgacaaaaaacttggaccactcaagatttttgttgatgtatgacatcaaaaaaataatcaggaggtgaaaccatccatggcaaataaagcagaattaatcgaaaaagttgcagcagctactgacttgacaaagaaagacgctacagcagcagtagacgctgtcttctcaacaattcaagacgctttagctaacggtgaaaaagttcaattgatcggctttggtaactttgaagttcgttctcgtgcagaacgcaaaggacgcaacccacaaactggtgaagaaatcaagatccctgctagcaaagtacctgcattcaaaccaggtaaagctcttaaagacgcagtgaaataattgagtcttccaaacccttgagtaatcaagggtttttttgtacataaatttacttatccctattttcatcaaaaatccaatgtagatccgtctactaaaagtacatttatcggagcaattgcaaaaaaattcagaaaatttattgacaagaattttttttcgcgctatattattaaacaattacaagaaaacagcaaatattttaatgaaggagccattttttatgcgcaattttaatcaatatttattagtcattattattgagaccaggacttagaacacggaagcaaaatttatccgtttgtttgagtcctatttgcgtaagtaaaatgggattctggcaaagcatcccagtttattataaaccggggtgcttttttttatgaaataggcgggagatgatggaattgagaagtgatcagataaaaaaaggcattgaagcagctccagcaaggagtttgctttatgcaacaggacaagtaaaaaatatccaagatatgaataagccttttattgccatttgcaactcgtatatcgatatcgtacctggtcacgtccatctgcgagaactggcagatattgccaaagaagccattcgagaagccggggggatcccttttgaattcaatacaattggggtagatgatggaatcgccatgggacatatcgggatgcgttactcattgccaagtcgtgaactgattgctgactcagctgaaacagtcatcaatgcccattggttcgatggtgttttttacatccccaactgcgataaaattacgcctgggatgatcttggcagctatgcgtaccaatgtgccagcaattttctgctctgggggacctatgaaagccgggattgatcctaggggccatcagacgacattatcttccatgttcgaagcagtcggcgcctttaaagagggcaaaatgtcacaggcagattttgaattcatggaaaaaaatgcctgtcccacctgtggttcctgtgccggcatgttcacagccaattctatgaactgtcttttggagattttagggttggcattaccaggaaatgggacgattctggcagtttcgcaagaacggcgggaacttgttcgcaaagcggcattccatctgatggatctagtgaagaatcaagtcaagcctcgggatatcgtaacagaagaagccatcgatgatgcgtttgctcttgatatggctatggggggctctaccaataccgtcttgcatacattagctattgcgaacgaaggggagatcgattatgacttgaggcgggtcaatgagattgccgaacgagttccttatctctcaaaaattgcgccatcttccgcttattccatgcacgatgtccatacggctggcggcgtctctgccattatacggcaattggtcgatatcaagggggcgatccatccagatcggctgacagtcacaggcagaaccttgcgggaaaatgtcgctcaggcgacaatcaaaaatgaagaagtgattcatccaaaggagaatccgtacagccctgtcggcggcttatcgatcctttacggcaatcttgcgcctcagggaagtgtcatcaaagtggggggtgttgacccaagcattcagctttttaaaggaaaagcaatttgtttcgattctcatgatgaggcagtagccgcgatcgacaatcatacggtccaaaaagggcatgtcgtggtgatccgctatgaagggcctaaaggaggtcccgggatgccggaaatgttggcgccgacttcgagtattgttggacgagggttaggcaaagaggttgcactgatcacagatggacgcttttcaggagccacgagagggatcgcagttgggcatatctctcctgaggcggcagccggtggtccgatctctttgatccgtgatggagatgacatcgtgattgatctgcgaaatcgctcattggaagtattagtctcagaggaagaattaatgttgcgtgcacaaacacgtccgaagtttcgggctaaagtgaagaaaggctggctggcacgttatacggcattagtcacatcagcaaataccggggcgatcatgaaaatcagcgaggaggaagtttaatggagaatatccagttgaatgaagtaactaggaccggtgcagaagtgttagtcgatagtttgcagaaacaagcagtagaactgattttcggataccctggcggtgctgtcttgcctttatatgaccaactctacgatgctgcgattccgaatattttagcgcgtcacgaacaaggtgctgtccacgcagcagaagggtatgccaaagccaccgggaaagccggcgttgtcctagtgactagtggaccaggagcaaccaatgtggtaacaggtatcgctgatgccatgagtgattccgttccattagtggtgatcaccggtcaagtagcaacagccggtattggcaaagatgcttttcaagaggcggatattctagggatcacattaccgatcactaaacataattaccaagttagacatgtcgatgatttgccgcgagtgatcgcagaagcttttcatatcgctaccacgggtagaaaaggtccagtggtgatcgacttgccaaaagatgtcacgcttcagcggacagccgcagtcattgaactgccgattgagcgaaaaagctatcaacccaccgtctttccatctattttgcaaatcgagaaattgatgaattgtttaaaacaagcaaaacgtccagttgtcttggcgggagcaggggtatgtgccgccaatgcagccgaagaattgcgtctgtttgtcgaaacccatcatttgccgattgtaaccacgctcttaggtcttggattggtgccagcagatcatcccttattcttaggaatggggggcatgcatggcacgtatgctgcgaatatggcattatctgaagcggatttgatcatcaatattggctcacgttttgatgaccgattagcaacagccggcagtcaatttggacaacaggcaatcattgctcatatcgatattgatcctgcagaaatcggaaaagtcgttcaaacaactattccgatcgtggcggatgcgaaagcagctttgacccagttgctgcgctatcctgcggaggaattagattgcaaggaatggctcaatcgttgtcaaaaacggaaaaaagaacatccttatcggtatgaccgcgaggaaacaaaggaaatcaagccgcaaaaattgattgaagaagtgggacgcttgacgaaagaggaagccgttattgttaccgatgttggtcaacaccaaatgtgggtcgctcaatactatccttttcgatttcccaaacagctgatcactagcggaggtttaggaacaatggggtatggcatccccgcaggcataggggcaaaatttgcttgtcctgaaaaaacgatagtcgtttttgtaggcgatggcggtttccaaatgaccaaccaagagtttgctctgctaaatgattatggtctggatgtcaaattcattttgatgaataaccgctctctcgggatggtacggcaatggcaagaaacgtttcataatgaacgccgttctgcttctgtatttgctaaacagccaaattttggccaattagcagaagcatatggcatcaatagtgtgcggatcgaaaccccagatcaattgaccaacgatttggccaatgcattgctagaacctggtgcacgactaattgaggtactgatctcgccaacggaacatgtgctgccaatgattccaccaggaaaagccaatcatgagatgataggagtttaaaagactatgaaacgtatccttgctgccatcgtgcataacgaagctggtgttttaagccgcgtcaccagtgtgttgaatcgtcgtcaggtgaatatcgaaagtatttcagttgggaccaccgaacagccggaattttcgcgaatgacgatcattatcaacgcagaaaacccactggagacagaacaagtgacaaagcaattgaataagcaaatcgatgtcttaaaagtttcagatattacagaagacccccatattgaacgggaattagtgctgatcaaagtgaacgcgccaacgactacacgttcggagatccaagctgtgatcgaaccatttcgagcccacatcgttgatgttgcattgaagactatcgtggttcaagtagcgggagactcagagaaagtagcagcctgtatcgacgtgttgcggccttatggaatcaagcaaatggctcgtaccggtgtgacaggtttcactagaggttaaatgcaagaacagttgcttttaataaaaaaagatttcggagggaagcatacatggtaaaagtatattataacgaagtgacagacaatttaggagataagactattgcaatcattggttacggttctcaaggacatgcccatgcacagaatttacgggatacaggacacaacgtcgtgatcgggattcgtgcaggaaaatcagctgagaacgcaaagaatgatggatttaccgtgcttccagtttctgaagctgtacaacaagcaaatgttgtgatgatcttagctcctgatgagatccaaggagaactttacgagaaggaaattgcgcctaatctttctgcaggggatgcattagcctttgctcatggctttaatattcattttgaggtcatcacgcctccaaaagaggtggatgtcttcctggtggcacctaaaggaccaggccatttggtgcgccggacctttagcgaaggatttgctgtccctgcgttgtttgctgtttatcaagatgctactggcaatgcacaagagacagccttgtcctatgccaaaggaatcggggctacaagagtcggtgtactagaaacaacgttcaaggaagagacggaaacagacttgtttggggaacaagccgtattatgtggcggactgacaagtatgatcgagactgggtttgaaacgctggtagaagccggctatcagccagaactagcctattttgaagtttgtcacgaaatgaaactgattgttgacttgatttatgaaggaggattcgccaagatgcgtgattcaatctccaatacagcagaatatggggattatgtctctggttcacgaatcattaccgaacaaacaaaagccaatatgaagaatgtcttgaaagatattcaaaacggcacgtttgccaaaggttttattgcggataatcaagctggttttccggaattcaaaaaaatgcgggaacaaaacgggaatcatccaatcgaaaaagttgggtcagaattaagaaaaatgatgccttttgttacgaaagattaaggaggaacagtgattgctggtatctgtcgatcaaatagaacaagcacatgaaagcttgcaatcagtcgtttcaaagactcctttacagcatgatcggtttttatccgagaagtatcaagcgactgtcttactgaaacgagaggatcttcagaaggtccgatcgtttaaattgcggggggcatattatgcaatcgcacagcaagatccggctatactgaagcggggggttgtctgtgcaagtgccggcaatcatgcccaaggggtcgcctatacctgtcatgaattgaaagtgtcggcggttatctttatgccgacgacgacaccgcaacaaaaagtagcgcaagttttgttttttggcggtgattttgtccgtatcgaacttgtcggtgataccttcgatgcttccgccgaggcagcccaacactatgccgaagaccatcaaatggcgtttattgatccctttgatgatcccgccattattgcaggccaaggaacattggcagttgaactgctggcagaagcaaaacagcgcaattattctatcgattatgttgtggcagcaattggcggtggcgggttgatcagtggtgttgcaacttatttgaaagcaaaacagcctacaatctcaatggttggtgctgaacctctaggcgccgcttcgatgcaggcggcttttgataatcatggtccgaccacattagagcagatcgataaatttgtagatggagcagctgtcaaaaaagtcggtcaattgacctaccagcatgcagctcagtacgtcgatcgaatagtagcggtagatgagggtttaatttgccaaactatcttggacttatacagtaaacaagcagttgtggcagaaccagcgggagcactgagtgtcgccgctctggaattgatcaaagaagagattaaagggaaaaccgttgtttgtattatcagcggcggcaataacgatagtactcgaatggcagagattgaggaaaagtccttgatttatcaaggcttaaaacattattttgtggtcaattttcctcaaagacctggggcgttgaaagaatttgttagcaatattttgggtcctacggatgatatcactcgatttgaatataccaaaaaaatcaatcgcggaacaggaccagtactgttagggattctgctaaaaaggcaggaagatctgcccccactactggcgcgaatgtcaagatttgatccacaatatattgatttgcgggacaatcaatctctctatactcttcttgtttgattttatgaaccaagcgttacgaaacaaacgacctttttaaaaaaaagaggtcgtttgttttttgatttcaaatccatggctttccctcatcctttcgctagttagtaggtgaaatggttgattcttgttataatagaagtaacaaatcgtagatggggggcggatgtatggaatttgtcttttctagaaaagaacagcagacgcaaatcttgtatggagaaacattgaatgctgttttacggacgcaggaaatttccaatgatcaagtcatcattctcacaaaccagcggtattatgatcgtttctctgaaaaactgacccgtttgtttttacccaaagaagtcagctggtatatttgtaccaatcaaatgtattgcaataattttacggaatttcaggcctttatgtccttcctaagccgcttttcgaaacaggagaactatttgatcgtgggtttcggcaatgaaggtgtgctggcgttaagtagttttattcactacacgtcgattctgactagcgatctttggttgatcccggtgtctttacgggcgttagctaaaagtgtcaaagaatctgcgatcattgttaagaaaccagatattcctgttttgcaaagtcccaatgtaccgcaagtggtcgtatacgatcaaacgattgctgaaaaacaaaaagatgggaagttggtggacttacttgtattgattcgttgcggactgctcacggatcaagcttttctgcgggaactctttcgcacgtttctgacagaaaaacaagtaaacaatcgttcgtttgcagcatatacagatcgggtgatccaagcctatcaagcaaacggtgcagcacttgaagaatatggacaagtctttacagatgctttttataagactgaaaatggacatttgctgtctgatgcaatgaaacttttttatggcctactctttcacttaatctggaatgttcaacaacagcagttagcagtcaaattagataagctttgcttgtggcttgaccaactagggtttcctttagtattgcctgaccaactatctttaagcgactattttcagcaagttctgctgttacagaaaaaagagaaaaaactgctttttttatcagaaattggtacaatagggggcagaaccagcgcattagaagaggatctcgtccagacaatgagcgcttaccaaacaataatcaatcagataagaggaacttagatggaaacatacagtgaaaaaatgttacaggcattagcagccgagaatttagctgatgcgcaattgaattttgcaaaagccctgcaatcagatcaaaatgaagtcttagccgaattaggagaagaattgatccaaatcggctttttagaagaagcaagagaagtatttgatacactgcaagaacgtgaccccgaaaatgaagaatggttgctatcgttagcagaaattgctatggaaaatgatcaaatcgacgaagcttttgattatctagatcgaatcacaccgcaaagctctttttatccacgagcgttattgatcagtgctgatctctatcaattgattgggatccccgaagtcagtgaagcaaaattattggaagctcaaaagctgctgcccaaagaatcgctgattcgttttgcactagcggaattgtatttttcaaccgaccgttatcaagaagcggcagagttttatcaaggattactaaaggaaaatatccaggaaatcacaggtatttccttattggaacggaccggagccgcattgagtatggctgggaaatttgaagaagccatcgaatatctggaagcaagtctagctgaggatcaaacagatgaccgtctattccaaaccgctttagtttacttacaattaaaagaaaatgagcatgcgattcgatatttgcagcagttgcgggcactgaatccgcaataccgttccttgtatctctatttagcagaggcattacaagaagaagagcaactggaagaggcacaaactgtcattgaagaaggaatccatgaagatccatttcaagtggatttttatcattttgcatcagaaaatgcgtatcggttgcatgacagcgaagcagccgaatccttcttattaaaagcccttgagacgggggaaaaagaagatgaaaccctgcttacactgagtaatctttatttgaatgaagagcgttggcaagaagctgtgttggctatcgagaagatggaagacaatgaacaaccccatgctctatggaatttagcacaggcttataacgcgttagaagagtttgaccaagcagcgaagttctatgaacaagcgaatgaaggattgcagcatgaaccagcttttatgaaagaatatggattgttcttaagagaagaaggacgattatcagaagctctacctttactgagacattatctggctcacgaacctggtgatctggaagtgcaatcgatcgtggaggatctattagaaagataggtgagggaaatgaacatcaatgtacaagaaaagaaaaaatttctcaattggttagtttctactgtatcattcagccgacgagaagtttcttgggttctgaactacctagcaaatcatgaagccattttgacaaatgttcatattgttgaaggggcgatgcagacagatcgggggttgagtgttcgcagtacagagattggcggcgagccatttgtgttgacgatccagaatcaaaccttttatgatatcgatcaaatttttcacgaaatcaggatgaattggaaacagccgctttatttagaatgtatctttccaaatccttgggaaaaaccactttatttagctgttctggaggacaatccttttgaacggtggaatgaccatgttgacgaagaagtacaaaaaaatgtgacagaatatcttgacaaagaagctatgcagctaaaaattgagaaattataccgccaaatcgatcttgctttggaaaatggggatcgggatgcttttttggaattatcggatgaagtcaaccgcttcaaactcgatcaaaaagaaaaaagtcattaataaagctattaaaaagcgctatgtgaagtaataaaaactagtggaacagaaaagaaccgcaagaaagaagaggactcccagcaccgagcgttcgtcgtttgcaacagtgtgcgggagaaatcaagtttcttgcggttttttctttataattagataggatggaagaatggggttatctttttgattttgctgccttgcgttgcaaaaatcgtgatttaggacgtaaataagtgaagccttccccttcgacttcatggacattgatcaccgacacgaacgcttgttgatcgaagtcggcaacgatccgtttgacctctgaaatttcccggccgcttactaccatataaatgatccgtttgttaccaccggaataggctccttccccatttaaaaaggtgacgcctcgttccaattcattcattaagacaggggcaatttcttcactatgattactgataacaatgatcccttttgctgaatagccgccatctaggatcgaatcaatcacgcgagcgaaaacataggaaaagattagcgtgtacatcatgcgtttcaaatcgatataggttaaggaaagcaatagaacgaaaacatcaaagatcaagagagaacgaccaatcgtgatcccaaagttcttttctaggatccgggctaatacatccacgccacctgttgtcccaccaactttataaacaacaccactgccgatccctgcaattagtcctgcgagtaacgcaacgatcagtaagtcatgctgcagatcgatcaataatggaaccgtctgccagaaacctaaccaaaatgaaagaccaaaggttccaatcactgtatagactagcgaacgtctgccaagaatcttacctcctagcaaaatgattgggatattcaaaatcagtgtactgtaagcgggattgatgccccacaatgcgcgcatgatcaacgtgatcccggtgacgccgccttcagctaaatcattaggtatatttaaatagacgagaccaaaaccatagacactcgttcctagaacaattaaggcaatatcgcggactgtccgccacgaaaaaaaagatcgcatcctgtttcccccatttctaaatctcacaagtaccaatttagcacgaaatttggcattaaacaatatgagcaagtcgatcctctatctaggcaggtgcgttttcttttgctaaaatgtgaaagaaagggtgaagaggatgacagaaaaacgttcactatatgagatgcaagaagaagtcgatgcctatatccaacaattcaaggcggggtatttcagccctttagcacagatggcccgacttactgaagaagtcggcgagttggcaagggaagtcaatcatcactatggggaaaaggccaagaagaagacggaagtcgagaaaacagttgctgaagaactaggtgatgtcctttttgttaccatgatcatggcaaattccatgggtatcgatttgacggaagtttttgaatccaatatgaaaaagttcaaccgcagagatgcgtatcgctttgaaagaaaagatgggaaaatgaatgaagctgactaagttaccacaagaatttgaacaagcaatccctgtattgcaaagaatcgaagcagccgggtttgatgcctactttgtgggaggaagtgtcagagatacaatcttaggacagccaatccatgatgtagatattgcaacaagtgcctttccagctgagatcaaagaactttttcctcgtaccatcgatttgggtatcgagcacggaacagtccttgttttatgggaaaatgaacaatatgagatcacgacttttcggacagaagaagcctatcaagatttccgtcggccagacaaagttgcttttgtgcgctctttggctgaagatttgaagcgcagagattttacaatcaacgcttttgctctgaaaaaagatggtgaaatcattgatttgtttgatggactggcagacctgcaactgaaaattctgcgagcagtgggtcagccgcacgaacgatttcatgaagatgcattacggatgatgcggggcttgcgctttgtcagtcaactgggctttacattggaaccacgaacatttgaggcaatttatgacaatcatcagctattggcaaaaatatccgtggagagaatcaccattgagttcgtcaaattgctgttaggggcacatcgcaattcagctttaaaggcttttgtagcgactgaatgttatctctattgtccaggactgaaacaagccggtgaagctctgttgcgaatggctgatttaccggagagaccattgaacaatgaagcttctgcctggacactattgattgaccagattggactttctacagcagaagttcgtccttttttgaagcaatggaagtgttccaatgaattgattcggatggtccaatcgttattcgagggagtattgttgcggaaagcagggccgtttagtgatgaagcattataccatctgggcagcgaggccgctcgactatcagaagaattgctatactattacggacaagaggtagatccctctgttagtcaagctcgctaccaggcgttgccaatccattcacttaaagacttggccatcaatgggcgcgacttgctgagccactttgaccaatccggcggtccttggatgaaagaagtgctagcagctgccgaaaaagcggtgattgagaaacgagtcgcaaatgaagagaaagcattattggcttttgccaaaacaatcgtattaaataacctataaataagcaggtgagaaaacaatgatcgaaaaagaatttttggttaccgaggaagatacagctcttgcagttggatcgggaggactgcctgtcttagcgacccctcgtttggctgccatggtagaagctgtctgttttgaagcattggaatcgcgtatagcgtctggtaagacaacagtaggaacacaatttacgatcgagcaccgggcggcttcaggaatcggtgcaaccgttcaggtatgctgtgaagagatctcgaatgaaaagacgtatgagtttacttttcgtgtctatgaaaacgatcaactgctagcgacaggtacgcatcatcgagcggcggtcgatatcgaaggttttttaaaaaaagtgagcgagaaagaaagttaatttgtgctccttagcagacaatgtgttaaaattgaaatgtattattaaaaaaaaggagcgttatgtcatggcaagagaaatgaaagcattgaaattttatttccgtaatggagaaacatggacgattgagcgccgttatattggagatttgtggatcaagcaaatcactactagttttggccgcatccacggaagcgaatttgttgagatccatccatgtgcaggattcaaaattgaaatcttccaagaaggggatcatgttgcaacacatgatatcaatttaggtggattggaattaggcatgttcgcccgcgctttgaaatacgaagatattgaacgaatggaaattctttaccgtaatggaacacctgatcttgtgtacttcccatacaaagacaaagatactgaaggattagataacgtttatcaatcaacaaaaatcagtgaaaaaacaaaaagcctttatattgtgattgatccaaaccaaacagtcgaagacgtttaccaagaacattttgaagaataaaaaaaagcagaactgagagcttctctctggttctgctttttcattacaatcactgataagtgcgaaaaaagtcggtatatttttttaataaaagatagtcttgactgacggcatctttaagtatgattttgtctccaagcaagcttttacgagcattttggatgatgcggtgttgaatatcatgatcgatcaagtaatcgatctcagtacgtttgatttccggagaagcactctcgcgatttttttcaagatactgcaaaagatcatattcaagatgtccggcatcattgattactcgtttgtattcgattttgtctaccttcacacgatcacgctcctttatatgataagttaccttatttccggagtaatgtaaaaaaaatctatatgaattagtaaatttttaaacacctgtttggtattgcatcaaaactactttacgcttagaagaaacagctagatgtgtcgcaagacttaaacagaaaatgaaaacaaaggagaaacagatgaaaaaagcaagagttatcgttgttagtggagtgactgcttcagggaaaaccacctttatccaaaaggtcgccaatctatgtcccggtacagcagttttatcttttgatgattatagtatcgatgcattgccttctgcaccatcctctgaggctctgttaaacgaaccctacgaagcaatcaatcaatttgatattcaaccattgataaatgacctaaaacaaatcattcaccactgtgcgctgatcttgatcgattttccgtttgggtatgtccatcagcaactcgcacctgctatcgacaaggccatttatttaagaacacctctggatattgtcttgggtagactaatcattagagactttcaacaacagccagagaaaattattaattgggtcacggggtatctagaggaagcgcgaccgctttttttgatgcacgaagaaattgtttctccacaagcagattatattcgagatgggacgattgattttcaagaccaaatgacttggttcaaagaagaagttctagcggaaaaaacgattttcgcagaatgattgttggaattgggaaaaatacttgtcacgtaaagaataaggtcatcttttgagagataaaaaaaggggatcttaattttccaggtaatcaaagggaaaattggggtaagcaaaactttctttgattctatactttcccttgctgtattattatttatacgcatatttagtctatagttaaaaaatagcattattaacaattaaaaacaagttacgattttgtcatctatctattttaaagtgaacatatgggtatagctcaaaaataaaaagccaactgcaatgcttgtttatcagcaagtgcagtcggcttaaaatgaattattttgtttcacggtgtaaagtaacttttctttcacgtgggcaatattttttcttttccaaacgatcaggattgttacgtttgtttttgtttgttaagtagttgcgttctttacaagaagtgcactctaatgtgatgtttacgcgcatgtttttccctcccatatattcaagaatcctctaagatttctctcagactaaaatataatagcatgtttggcaaaggaatgctagtagtttaatgaaatttgttaagtaattttacttgacgattttttgaatgaaatcaaccattttcatccaatttatttttcacgtcttcgatcatttttgtataagcaatcggtccgttatacagccagctggattcaggtccaaactcccaaagatttccttctttgaccgctttaagattttgccaaacttggtctttaaaaaagtcggctccttgatcgctgtttactagaatcaggtaatcagcatctaattcagctaatttctccaaagaaacggcagaccagtcagctgtcgctgttttgctgatctcagaaacaagtggcggtacagagaatcctagttcatgatagaggagctgaccgctggaacgatcgtcagcaaccataaaagcagaattgttggtgacccagagaacagccaccgacttcccattgattttacctgaaaattcttgcttagttgtttttactaagtcatcatagtctttttctactgtttttgcttgatcttctttatgaagaacttttgcgatatctgtcaaacggtctcgccaagagacatttttaccatttttgactacataagtaggggcaattttgctgtattgtgcatatttatccccttcaaccatcgtattgctgtcgatcagcaacaagtctggttcataacttaagacgtcctcatagggcaagtcgtagctgatccttggtacatcacttagtttctcttgcaaatagccttgatcactgttattaccaacagtccattgtgctactggtgtgacgttcaaggctactaagtaatcttctaaataactgccgatgattcgctttggatcatccgggattgttacttcatgtccagccgcatctttcagcgttgccgtctcagctgaggaagatgacttggtattattggaattagctgaacaagcactcaatgctgttaagctgactagggtacaagacagccaaaaaagtgtttttatggttcgttttttcattaggttcctccttataggataaatgagaatcattctcactttctttttgtcattatcacgaagaaaaagtgatttgtcaatccctggttttttgctttgaagcattgacggatagaaggaaaaccgtcataattgataatcattatcaatagaattttgagggaaagatatggcaaacttacgcacggtcgatttgactgtcggctatcaaaaacaaaaaattgtgcaaaagataacaatcgacatcccagaagggaagatcattggtttgattggacctaatggtagtggcaagtcgacttttctaaaagcattagcccgaatcctgctacctatggaaggggaagtttatctaaatgaacagaatctacaaacgatcaaaacgaaggaagtcgcaagccagattgctttgttgtcacaagtcagtgattcttccatcggattaaccattcgagagatcgtttcttatggtcgttttccttatcaaaaagggctaggtcggttgaccgcaaaagattatcaagccattgaatgggcattagctgcgacagatttgaccgaactagcggatgctggtatccatacgctttcaggaggtcagaaacagcgggtttggatcgctatggctttggcacaagatacagagattgttatcttagatgaaccgacgacttttttagatccggcacatcaactagaagtgctgttattgttaaagcgaatcaatgaaaaatatgggaaaacgatcattatgtcgattcacgatctgaatcatgcatctcgattttctgattatatttttgccttaaaagaaggtcaattaatgacttgggggacaccagaagaagttttgacccattcatggctccaacaattgttcgctatcgaagctgttttaggtacgtttcccaatagttcgaaaccgttgcttttgacctatgaattaggagccaacacatgaaaaaatttacgattcttttgcttgttctaagcggattattggtcgctgtgttttttctggcattgacgcaaggggcagctgatattcccttaataactattaaagaggccttttacgcatttgatccagaaaatcaaacccatcaagtgcttagaaatatccgtttgccgcggatctgtgcttcgtttattgttggcagcagttttgctgtaactggtgccatcatgcaaggagtcaccaaaaattcgctagcagatagcggtttactaggaatcaatagtggggctgcagtcggattagccgttgcatttatcttgtttccctcactacaaccgaatcaggcagcgttgttttctttcttaggcgcttttctagctacttcttttttatttttgttgacgaagtattcaaggatcggtatgacgccgactggattgattctagcaggtgttgcattgagttcttttttttctgcgattagtcaagtattatctttacaatttgatttgaatcaagacttggccttttggtttattggcggtgcagcaaatgtaacgtggacacaattacaagtgatcacccctatttatctggtggcgctcttcatcatcctaggactcgggaaatctttgaatttgctggctatgggagatgagacggcaatctctttaggcaaacatcctgaacggattcgacttgtttctttagccgtagttgttctattagctgggacggctgtttcactggtgggaccggtcagctttattggattgatggtccctcatgtgattcgcggactgattggcaaaaattatcaaatgatcttacctttgacgatagtggcggggggaatattggtaatcttagcagattgggtaggacgaatcattcagccaccttttgaaacgccttttggaatcatgatggctttgattggggttcctttcttattagtgaagattcggagggaacagctatgaagaaaaaaatcggtttcctttttgttttggttcttctggcgttttgtggcagtatcatggtgggaaagacgttcttttcttttgatctctggctcgctctttggcagcaaactctaacagctagccagtcattgatattcttcgatttccgacttcctcgagcagtactggcactgattgctggaagtgcgtttggcttctcaggttttttgttacagggagtaaccagaaatgagttggcggatgcaagtattttaggaatcaataatggagctggcttatgtgtcatgctctacttaggcttttatgcccagggctcccagctgttaccactaattggtatgattggcggactattagctgcactgctagtctatgctatcgcttataaacagcggcagctgctttcaatggagcgaattttattatctggaattgctgttaatgctggacttgcttctgcgtcgttattattgactgttcaattgtcaaaagaacgatatagttttgttacggcatggctttcggggactatctggggaacttcgtggacgcaagtactaagtttgttgccttggttcttgattctaggattgttggcattcatgattacacctttgatcaatttactgggttttggagaagaacaggcgatcagtttaggtgttcccctaaatcttttgcgcaccggtttgttgttcgtagcgattggcctggccgcaagcagtgttggctatactggaaacttatcttttattggtttattggcgccccatatcgctaaacgattgattggcaaagaatctcgttgggcattgatagcagcgggaatgattggtgctattttggtgctagtcagcgacacagtcggccgtcttttacttcaaagtggcgaaattcctgctggtatcgtgattgcgatcattggtgctccgtactttttgtttttgctgattcgtcaaaaaacgtagtcgtgagaattttttcacgattgcgtttgctatttgagtccggtttttggtactattcggagtaggagttggttaattatggataaaaaaattttgcgtgaacaagggctaacccgactcaagcaactggatccacgaacaaagcaaaccaaagagcagatcattcagtctttgttgtttgcttccgaagagtggctcgaagcagaatccattggcgtgattcggtcattgccgtttgaatttgatacaaagccgatttttgagcgcggatttcactctggcaaacaaattgccgtgccacgttctgtgagaaagaaacttcacttttatcaagtggaaccacagactgaatatcagctttccagttttggggtagaagagcctctttctcaaaaaaaaatcgatgcattggacctggatcttttgatcgttcctggtttgattttttctcatgagggatatcggattgggtttggcggcggttattatgatcggtttctggcagatttccaagggaaaactgtgtcattggtttttgcagaacaatttgatgtccggtggcaacctgattcttttgatattccggtccagaaaataatcactgataaagtttctttcggagaaaaaggagtagacaatgaataaacaaatgaaacgctggcttaatcgtccaatctttacttatacgtttttagccatccagacgttagtctttattatcggctatattagtccgatgactcaagtgatgggggtgatgtttggcccttatgttgcttacatgaacgagtattggcgttttgtaacgccgattttcattcactttggtctcgctcattttgcagtgaattctgttattctttattttatgggtcaacaggtggaagcgatctacggtcatgctcgtttcttcattttgtatttgatgagtggggttatggggaacgcgatgagttttgcctttaatcaggccggtgtccaatctgcaggtgcgagcacgtcattgtttggtctgtttggtgcttttctgattctgggactccactttaagaatgattaccagatccaagcgatggttcgtcaatttgcattgttcgttgtcttgaatttcgtatttggtctatttgatcaatcgattgatatttggggacatgtcggaggaatcttaggaggattcatcttaggcaatgcattggctttaccaaagaacttcgagaaatattcgattcatacccgcattctttccgccattgtttttctttttttactggcagtttttgtgatatatggtttaaaaaagtatcaaatacttgtataataagcaggaagtgtgtttatggaaacgttatatgacgtacaacaactattgaaacaatttggtgtctatatttatgttggcaagcgaatctatgatatcgagttgatccagatggaagtcaaaaatctttatgacagccgtttgatcgatcgagatacctatttgaccgcttggcgcattttaaagcgtgaacatcggattgaagaaagccgggaggaaaataagtgatggacaaaaaaatcatcgggattgatctaggaggaacaacagtcaagtttgctgtgttgacttctgaaggagagattcaacaaaaatggagcatcgataccaatattcttgatgagggttcccacatcgtaccagagatcattgcatcaatcaatcatcgtctggatttgtatggcatgaaagcagaagacttcattgggatcggtatggggactccaggaagtgtcgatcgcaaaaaaggaacagttatcggtgcttacaatttgaattggaaaacgttgcaacctgtcaaagaagcgattgaaaaagggacagggattccttttgctatcgataacgatgccaatgttgctgcgttaggcgaacgctggaaaggcgcaggtgacaacaatcccgatgtgatctttatcaccctcggtacaggtgttggcggtggaatcatcatggaaggacaacttttgcatggtgtagcaggctgtgcaggagaaatcgggcatattactgtagatccagaaggatttgaatgtacttgtgggaagcgtggttgtttagagaccgtgtcaagtgcgacgggtgtcgttcgggtagcaagacatttggcggaagagtatgctggcgattctgaattgaaaaaaaatctggataatggcgaagatatttccagcaaagatatttttgaagcggcccaagcgaaagatccgtttgcattgatggtagtagataaagtctgcttctatttaggccttgcttgtggaaacttgggcaatacactgaatccttcaagtattgtactgggtggcggtgtctcagcagcaggtgaatttttacgtagtcgtgtagcagcttactttgcagaattcacattcccgcaagtaacggaaagcacggaaatcaaattagctgagttagggaatgatgctggtgtgatcggcgctgcgtcattagcattacaatttgcaaagtagagaggaataggtaagatgtctgtttggaactggattaatattattttaggattgattttattggcaatcgcattgaattgggcgtacttccaaattatgggaagacgatcagccaaaatcatttccgaagaagaatttaaaaatggcatgaaaaaagcacaagtgattgatgtgcgggagaaaaacgagttcgatgccggtcatatcttaggtgcacgaaatatcccatttacggtattaaccaattcgtttagcgcatttcggaaagatcagcccatctacttatatgatacccgtaaatctctaagtatccgtgctgcgaataaacttcgcaaagaagggtttaaagaaatttacattctaaaagaaggctatgaaggctggagcggaaaaacgaaaaagaaaactagttaatcaatcaaaagactgagatcaatgatcaaacaagatgttcctaagaggcgcgagaatgaatcgttagaaaccattcagcagctgtaactgagaatcttgtcatcatggactcggtcttttttttttgaaagaatgtgttaaggtagattcaaaggagtggaaggaaatgattaaagtaaaacgtgtatacgaggctgcagcacccacagatggttatcgggtccttgttgatcgaatctggccaagaggcgtcaaaaaagaagtggcggcgattgattcttggttgaaagaggttgcacctagtacggaattgcgtaaatggtttggtcatgatccagagcgctttgatgcgttttgtcaaagatacctagcagaactaaaaaagaagccagccgatgatgcctttagtgcattgcagcaaatagtaaaagaccataaaaccgtgacattggtttatggtgcaaaagatgaaacacataatcaagcggttgtattagctgaagaattgaaaaaactgccattgaagtaaaatcttcaatggcagtttttgtattaacgagagacacttttacgcatagctcgttttcttttttcttcatttagtgcttgttgttcgtcaattggatcgatcacttgttttttgacagtcatgactacgctagcagctgctgcgatagttgctactgtaccaactaagaaacctgaaagaaatcgtttcattcttctccacctcgcctttatctatttatttctattatgaaacaaaagtacaaaaatatcaaaaataagcccttgtatcgcgagtaaaggattgataaaatttagtaaatattttataataaatttactaaatgaaatgaaggagcgaaaaagatggaacagctacaacaaatttttgcagaaaaattcggtgaaaaaggcacaggatcgtattttgcaccaggacgaatcaacttgatcggggaacatacagattataatggcgggtatgtctttccagcctctatcacgataggaacgtatggtgtagcacgaaaacgggcagataagcaaatacgtctttattcggaaaacttccctgaaaaggggatcatcactttttccttagacgatttggagtaccgcaaagaagacgactggaccaattatcctaaaggtgtgattcgctatttgaaagcagcgggtcatgcaatcgactctggtattgaaatcgctttttatggcaatattcctaatggtgccggcttgtcttcttcagcctccattgaattattgacaggagtgattcttgatgatttgttcggattggcgatcgaacgtttagagttgattttgaaagggaaaaaagttgagaatgaatttattggggttaattcaggtatcatggatcaatttgctataggaatgggaaaaaaagaccatgcattactgctagataccaacactttagcttatgaccttgtacctgcagaatttggggactatgtcgtagctatcatgaatacaaacaagcggcgggaattggcagattcaaaatacaacgagcgccgtggggagtgtgaagaagcattaaaacgacttcaaacgaaactgaaaatccaatcgcttggtgaattggacgaagcaacattctttgcacatacttcactgattgaagatccaaccttgatcaagcgcgcaaaacatgctgtaactgagaatcagcgtaccttaaaagctaaagcggcattagaagcgggagatttagaatcttttggtcatctgttagatgcttctcatgcttctttaagagatgattatgaagttacgggtatcgagttagacactttggtggcagcggcacaagaacagccagcagttttgggagcccgaatgacaggggctggatttggtggttgtgcaatcgctttggtgaaaaaaagcgagtgggaagcttttgcaacggctgtcaaagaaagctatcgtgaaaaaatcggctatgagacagatatttaccaagcaagcattgatgatggcgcgcgaaaactgtagaatgtaagacggattcattgaataaatgaaagaaaaggatgattaagaatggctattttagtattaggtggcgccggatatatcggctctcatgcagttgatcaattgattacgaaaggataccaagccgttgtcgtggataaccttttaacaggtcatcgtcaagcgatccatccagaggctgttttctacgaaggagatattcgagacaaagcatttttgcaaagcgtttttgagaaagaaacgattgatggcgtgatccattttgccgcaagctctcttgtcggtgaatcagttgagaaaccgttgaaatacttcaacaacaatgtgtatgggatgcaggtattattagaagtaatgaaagacaacaacgttgatcatattgtcttttcttctactgcagcgacttatggcgagccagaacaaagcccaatcacagaagaaacacctacaaatcccaaaaatccttatggggaaagcaaactcatgatggaaaaaatgatgcgttggtgtgatgaagcttacggcatgaaatacgtcgctttacgctactttaatgttgcaggagctaaatcagatgcttcaatcggggaagaccatgatcctgagactcacttagttccaatcatcttgcaagtcgctttaggtcagcgtcaggagctagcaattttcggtgatgactatgatacgccagatggaacttgtatcagagactacgtacacgtagaagatctatgcaacgcccacattttagcattagaatatttgaaaaaaggcaatcctagcaatgttttcaatcttggcagcaacaatggctactcagtcaaagaaatgttggatgccgcgcgtactgttacgcaaaaagatattccagcgaaagtagcaccgcgacgtgccggagatccgggaacattggtcgcttctagtgataaagcaaaagcggtgttaggttgggaacctagttacaccgatgtgaaacaaataattgaaacagcttggaattggcacgttagccatccagaaggttatcaagactaggaggcaacaaaatgacgctcagtcaaacaatctgtgatttcgtgacattagcgatccaggctggtggttggatggaaatggatcgtatttatttacaaaataggatccttggtatgattggtgaagaagactttgaatcagctactgtacgaccggtcgaagaatcagccgtggtattgatggatcaattggtcactcaagcaaaaaaaaatcaggtgatcggcgaggcacttgctgaaaccgaaatccttgaagcgcaattgatggatttcttgacgccaccgccttctgtggtcaatgctttctttgcccagcactatgcaaaagacccacaagaggcaacggattatttttaccatttgtgtcagcaaaatgattacatcaagactcgagccatcaagaaaaatattgtttttccggtaatgaccgagtatggagaattagagatcacgatcaatctatccaaacccgaaaaagatccgaaagaaatcgctgcgcagcgagcagcagcagcgatcgattatcctaaatgtctcctttgtttggaaaatgaaggttataaagggcggctgaattacccggctcgaacaaatcatcgcattattcggatgaatctggacggcgaagcgtgggggcttcagtactctccgtatgcttattacaatgagcattccatctttttgtctttagagcatcgtccgatgaagatcacgcgcaaaacctttgaccgtctattgcaaatcattgaggttctgcctcactattttgtcggttcaaatgctgatttgccaatcgtaggtggatcgatcttgtcccacgatcattatcaaggtggacggcatacatttgcgatggcaaaagcacccattgagaaaacattcaaactaactggttttgacgagctaacggtgggaatcgttaaatggccgctttcggttattcggattcaaggtcgagacaagcaaaaagtggctgctgcttctgattatattttggcacaatggaaagagtactcagatccttccgtttcgatcaatgcttattcagaagatggcacaccgcaccacaccatcacaccaattgctcgaaaacagggcgaatactttgaaatggatcttgttcttcgggataacaatgtttctgacgaacatcctgatggtatttttcatcctcataaagatgttcagcatatcaaaaaagaaaacattgggttaatcgaggtgatgggattagcggtcttgcctccacgtttagcaacggagttagaagaagtgagggcctatcttcttgatcagccaaatcaaattgctgcttatcatattccgtgggcacaagagatgaaggaaacctacaccatcactgaggagaatgtaacagagattgtttatcaagaagttggtgggatttttgcaaaagttttggaatacgcaggagttttcaagcgagatgcatccggtcaggctgcattcatgcgttttatcaataaactttgaagttattgagatgactttgaaagaatggaggcgcgggaatggctacaattaaagatattgctgaacaggcaggcgtttcaccagcgactgtttctcgtgtcctcaattatgacagtgagttagccgtcagttcagaaactaaagaaaaaatattcaaaaccgccgaagcactgaactatacaaagcataaaaagaaaagccaagtcgaaaacggtcggattcgtttgattcagtggtttgataccgaagaagaactggccgatctttactatttagctattcggcttgggattgagaacaagacggaagaattggggattcgcttgttaaaagaatcgtttgcttctatcagtgagacccaagtagatggaacgattgctttaggaaaatttgatgcccagcagatcgcacaattaaaaaagacgcagcctcatctgctactcgttgattttgacgggctgtcggctggagtggattcattggtagtcgattttcagcaagcagtggatttggtcattgatcattttgttgctaaaggacatcaaaaaatcggtatcttatctggtattgaatttacaaaaggaagtcgacaagaaattgaagatccgcggctgacgctattcaaggaacgactgacacgcttgcgtctttatgacgaagggtatcacattgcagcagcgtttactgtcgaagatggatatcaggcaatgaaacagttcttgcaagacgccttgccactgcctactgcgttatttgcttccagcgatgctttagccatcggagcactgcgggcactgcaggaagaaaagattcgtgtgccagaagatatctccttgatcggctttaacgatgtcagtgttgccaagtatgtttttccaaccctttcgacaatcaaagttcatacggagtggatgggagagttggctgtaaccacactacttgagatcatcaagaatccagctcctgttccgcgaaaggtcaccatcgcaacggagttgattaaacgtcaatctacgaatcaatgatggggaagttcatctgcaacaaatagaaatgtcctgagaatctatgggaaaaagtctccagtaatggaacagttttccgtcgcagtcagaaactgtcgcggctgccatagattctttggccatttttttagttcaccagtaaccatgcacctatgaaagcaaataagcaaagtttggcattttatcagaatatggtaaaatatgagtgagttttttgattggggagaaaaagcaatgaaaacattagcgatcgatacatcaaatcaaacattggccattgcagtcatggatggtcaggagatcctaggacaaagtcagacgatggctatcaaaaatcacagcagtgcattgatgccggcaatcgatttattgatgcaatctgtgggggtattgccgcagcagttagagcgaatcgcagttgcccaaggtccgggatcttatacaggattgcggatcggtgtcacgaccgctaaaacattagccgatacattacatatcccattggtgggcgtgtcgagtttgaagaacatagctgcgaattgtgttggggttttgaaagtgatcgtgccattatttgacgcacgtcgcaacaatgtctatgctggtggctatcgttggcaggaaggggagctgcagtcagtgatccctgaccagcatgtggcattaccgacattgttgcatgcactagctgagttgcacacagaggtactttttgttggcgctgatgctgcaaaatttgccccgcaaatcactgaagccatgccgtctgcacagatcaatcacgtttctttgtggaattatccgaatggcgtcgtgttggcagaattaagtgaaacagaggaacccgtttcgtcgatccatgattttgtgccagagtatttgaaacttgttgaagcggaagaaaagtggttggcatctcatactccaggagcggatacgtatgttgaaaaaatttaaatctttcaaaggaaagctgaccctttttcgtaaagttcaatacccagaacagacgaaaacgattcaggatgaaacgtatgtgattcgtgaaatcgtcggcgaagatatcaaagagttactgcaagtggaacgattggtgtatgccggcgagctgccttggaccaagagcgcgtttctttcagagatttattcgcgatttaagcatttgtacttgtgtatcttacaaaatgagcgcatgatcggttttgcgggcgttcgtttgttgggagaagatgctcatattaccaatattgctgttatacctgaatatcaaggccgaggtgtcggctcttttttgttgactgaaatcgaacagtatgcgcgaaaaaacaaatgtgaccgaatttcgttagaagtgcgtttaagtaatcgtgacgctcagcggctttatcgacagctgggctttgtctcgcgagcgatcaaaactgcctactatacagaaggaaatgaagatgcattggatatggtgaaatttttaaatgaataaactgttgaataaagaagaattgcctgcaaaaagtgaagagctgttatggcaattggcagaagcgagttaccaagatggctctccctggacttgtgaacaattcaagcaggatttggctgctgttgacagtcactatttagtactccagccaatggaggcatttgttagttaccgtcgggttttagatgaagctgaaatctttaatctcgcagtcttaccggaaaaaaaaggacagggattggggaaactcttgctgcaagctgttattcagtcttgtcaatctgctggcgtcgaaaggatttttctagaagtgcgggtccgtaattttccagcacaagccttatacctgcgaatgggttttgaaatcattgggcggcgcaaaaattattatagtcatcctcaagaggatgcattgatcatggaaaagaaagtgaggccagcatcaatcaaatgaatgaattgattttagccattgaaagcagctgcgacgaaacaagtgtcgctgtcataatgaacggggacacgattttaagcaatatcgtggcttctcaaattaaaagtcatcaacgttttggtggcgttgtcccagaagtagctagtcgacatcatgtggagcagattactctttgtttagaagaggcactgaaacaagcagaagtgacaccagaagacttatccgctgtagcggtcacgtacggtccaggcttagtgggggcgttgctgatcggtctttcggcagccaaagcgtttgcctgggcgcatggattacccttgttgccagtcaatcatatggcggggcatatctatgcggcccgttttgtcaaacctctgacctttccattgcttgccttgctagtgagcggtggacatacggagttagtttatatgacagaagatggttcctttgagattattggcgagacacgtgacgatgctgcaggagaagcatatgacaaggtaggacgagtcttaggactttcttatcctagcggaaaagaaatcgatcgtttggcgcatttaggtgaggacacgtaccattttcccagagcaatgattcatgaagacaattttgattttagttttagcggattaaagagtgcctttattaattttgtccataatgcgcagcaacgaggagaaacattggacgaagccaaccttgctgctagttttcaagcaagtgttgtagaggttttggtcactaagacgattcgcgcctgcaagacttatcctgtcaaccaattgattgttgcaggtggcgttgctgcaaaccaaggcctgcgtcaggcactagatgaagcaatgagtgacctgcctgagattgacttgattatcccacctttgcgtttatgtggcgataatgcggcaatgatcggggcctttgggcatattttgttagaaaaaaaacagtttgccccactatctttgaatgctgtgccaagcctaagttttggtcatgaaatgaaataatcaagcatttgctgctcaacattacagagaagaccgtggcgtcatcgggatacgaatccgaatggcagcccacggtcttttgtttaattatttggataaaattgattaaaaatacgtaaaacttgtatatattgaataaaaattataaaagatgtatactggctaaaaaacataggcaagaaagggtgcaaaagaaatgaaatccgtttttaaaggtcgcagttttttagcagaaaaagattttaccagagatgaattgcagtatctgatcgatttttcattacatgtaaaagaattaaagcaaaagaatatcccgcatcgttatttggaaggaaaaaatgtcgctcttttgtttgaaaaaaattctactcggacacgagctgcctttaccgttgctgccgttgatctaggagcgcatccggaatttttaggagcaaacgatatccagatgggatcaaaagaatctgttgaggactctgcaaaagtatttggtcggatgtttgatgggatcgaatatcgaggatttagccaaagaatcgttgaagacttggcgaaatattctggtgtacctgtctggaatggattgtctgacatgtggcacccgacacagatgatcgcagactttatgacgattcaagaaaattttggcagtcttgaaggtctgacgatcgcttactgcggcgatggaagaaataacgttgcgcaatccttacttgtgactagcaggattctcggtgttgctattcgaatcatcgcaccaaaagaattacagccggaacagcaagtcatcgagctggcagagcaatttgcccaagcatcacaagccgaaattttgattacagatgatgtggcagctgtagcaggagcagacgttgtttataccgatgtatgggtttcaatgggagaagaagcaaaatttaaagaacgaatcgacttgctgatgccttaccaagtaaatgccgaattaatgaaaaaaaccaataatgaacaagccattttcctccattgtttaccagcttttcatgatacacaaaccaaatatggggccaaaatcgctgctgattttggcttgaaggagatggaagtgacgaatgacgtttttcacagcaagcaagcgcgccagttcgatcaagcagaaaatcgccttcactctatcaaagccattatggctgtcacccttggagatctatttattccaaaggtttaactagcgaaatccatgcaaaggcgaaaaaccggctagccaaaccgattattttttgttatactttctgggaacaaaatagtagataatcgatgagcaagaagagtagcttttgtttttcagcgagttcgggaaggtgtgagccgaacaatcaagaaagtgaagcgcacttgtgagattttgcctagcaaacggaattctgccgttatcagaaataagtaggtcttttaagaatcattccttaaaggacaaatagagtggtaccgcgggaaatctcgtctctagtgcatgtgatgcactagagactttttttagttgttccgcatgtacattcgctgggcattgctttcgtatcgaaacaaatggagggaaagaaaatgaataataaacaaatcgttgcacaagctatttatgccgctgtcaaagaagatttgactttagaacaagtcagtcaattgttagaaaatcctaaaactgctgaacacggagacgttgcttttcctgcctttgctttagccaaagtctatcgcaaagcaccgcaacagatcgctagcgagctggcggaaaaaattgatccagcttcttttgaaaaaatcgaagtcgtgggtccatacttgaacttttttatgaataaagaagtgatcagcgaacacgtcttacaaaccgtcttgaaggaaaaaaatcattatggagatcaatcaattggcaatcagcaggcggttccgattgatatgtcttcaccaaacattgcgaaaccaatctccatgggccatttgcgttcgacggtgatcggtaattcgattggctttattcttgaaaaaatcggttatcagccaattcggatcaatcatttaggagactggggaactcaatttgggaaattgatcgtcgcctataaaaaatggggttctgaagaagcagttaaaaaagaaccaatcaatgaactcttgcgtttatatgttgaattccatgaacaagcagaaaatgataaagcgttggaagatgaagctcgggcatggttcaagaagctagaagacggtgatcaagaagcaaccgaattatggcaatggttccgcgatgagtcattgcaagagttcaacaaaatctatgacatgctggaagtaagttttgattcattgaatggggaagccttctacaatgataaaatgacggaagtcgttgaacttttggaagaaaaacatttattacaagaagatcaaggcgcagaaatcgttgatttgactgcctatgatctcaatccagcgttgatccgcaaatctgacggcgcaacattatatatcactcgggatatggcggcagcattgtaccgcaaacggacttataactttgctaagtctctgtatgttgtcggtaacgaacaaagctatcattttaagcaattgaaagcagttcttaaagaaatgggcttcgattggtcagatgatatgcaccacatcccatttggtttgatcaccaaagatggtaagaagctgtctactcgtaaaggaaaaatcgttttattagaagaagtattgaatgaagccatcgaatctgcgaaagaacaaatcacagaaaaaaatccaggcttagcgaacaaagatgaagtggcaaaacaagtgggtgtcggtgcggtcgtctttcatgatttaaaaaatgatcgcctgaacaacttcgatttcacattggaagaagtcgttcgttttgaaggagaaaccggaccttatgtccaatattctcatgcacgggcgatgagcattttagaaaaagcacaatttgatcctgccaatgcgcaagctcttgctttgaatgatgcagagagctgggaagtgatcaagttgatccaacgctacccagaaactatcttacaggctgcagataaatatgagccatcagtgattgctaaacatgcgatcaaattagcgcaagccttcaataaatactatgcaaatgtcaagattttagcagaagatgcgcaaaaagatgctcgattggcattgggttacgctgtaacagtcttgttaaaagaagatttgcgtctgttaggattacatgcacctgataaaatgtaaataaaaaaaaagataccaacggcagcctatatgcttgccactggtatctttttttcgattctttagagaatagcatgggacttgatatattcagtcagcttgatggcatcttcatttgtacgggaaataacggctactgtatcaaagccggcgagggaacaaactttctcaggcatcgaaacttcatctaaagccgctgccaataaaggtgcattgtcagggagcgtattgattagcgtcataaattgaacacgatccactttggtgacgacatcttccagcatgtgaatcagccgttgttcttccgctttttcattttcttgagtattcattccttgaaagagaacaaattttgtttgtccagtctcatcaggctgtttgacaatttttagatcacggatatcgcgggagatcgttgcctgcgtagcggttactccttgtgcttcgagcaactgcaacagttcttcttgagttcccacactatgttctgcaataatctgtttgatcaataaatgccggtcggatttacgcataaatagactcctttaattgaattcttcagcattatcatagcagaaaaaggattaaaaacctaggctttagtcagactgaacacccgttgtttgtaagaaaaaaatgtaaaagtaaacagctaggtttatgaggaaaagcagttgcaattctttagtagctactgtatactgtttaaggcgtgagttttttgactccgcaaatccacatcttgttccatctgcgaagcggtgctgataatcagttcttcgaagagctaaagagcaagagaggaaatcaaaaaccaaattggaggaaacacatcatggcagtaatctcaatgaaacaattgctagaagccggcgtacactttggacaccaaacacgtcgctggaacccaaaaatgaagaaatatatcttcacagaaagaaacggtatctacatcatcgacttacaaaaaactgttaagttagtagatgcagcatacgactacatgaaaaacgttgctgaagaaggcggagttgctttgttcgtaggaacaaaaaaacaagcccaagaagcaatcaaagaagaagcaatccgttcaggtcaatactacgtaaaccatcgttggttaggtggaacattgacgaactgggaaactatccaaaaacgtgttgctcgcttgaaacaaatcaacaaaatggaagaagatggcacatttgatgtccttcctaaaaaagaagtcgttggtttgaacaaagaacgcgaacgtcttgaaaaattcttaggcggtatcgctgatatgccaagaattccagatgtaatgtacgttgttgacccacgcaaagaacgcattgcgatccaagaagcacgtaaattaaatatcccaatcgtagcgatggttgatacaaactgtgatccagatgagatcgacgtagttatcccatcaaacgacgatgcgattcgtgccgttaaattgatcactgctaaaatggcagatgcatttatcgaaggcaaccaaggcgaagaccaagtagttgaagaagatttttctgctgaatcaacagaaaatgctacttcaatcgaagaaatcgttgatgttgtcgaaggcgacaatgtatcagctgaataagaaatgatggagctgtttcaaaggctaggcgccaagcctcactctcctttgaaacagcttttttaaaaggcaagttcaggcttgttaaatgacatttaggaggaaaacaaaaaatggcagaagtaacagctaaattagtaaaagaattgcgcgacatgactggtgtaggtatgatggatgcaaaacgtgccttagttgaagtcgaaggagatatcgaaaaagccgttgatctattacgtgaaaaaggaatggctaaagctgcaaagaaaaatgatcggattgctgctgaaggattggcatctgttgctatcaacgggaatgctgctgcaatcgttgaagtaaactctgaaacagacttcgtttctaaaaacgaaatgttccaagatttagttaaagaaatcgcagaagtaatcgctgcaaacaaacctgctgacatggaagctgctttgcagttggaaacatcaaaaggtaaaatggaagcagcattgatcgaagcaactcaagttatcggtgaaaaaatcagcttccgtcgttttgaagttgttgaaaaagatgacaactctgctttcggtggctacttgcacatgggcggacgtatcgctgtcttgactgttcttgaaggaacaacagacgaatcagttgcaaaagatgtcgctatgcacgttgctgcaatcaatcctcgctatgtgaatgaatctcaaatctcacaagaagaattggatcacgaaaaacaagttttgactgaacaagcattgaacgaaggcaaaccagccaacatcgttgaaaaaatggttgaaggccgtttgaaaaaattcaaagcagaaatcgctttggttgaccaaccattcgttaaagatcctgacatgactgttgaaaaatttgttgcttcaaaaggcgcaacagtgaaatcatttgttcgttttgaagtcggcgaaggtatcgaaaaacgcgaagataactttgtagaagaagttatgagccaagtcaaaaaataattctgttcctcgaacagatgggaacgcatggaagtgcgctccctttttttaagcaaaaaccgattttcaaaaaaattgcacaaattcaaacagaatggcgccaatatgctacaatagtattggagaatgtacggaggaatcatcatgggtaaaccaaaatatcaacgtgttgtgttaaaattgagcggcgaagcattggcaggggatgaaggatttggtatcaaaccgccaacgatccaagaaatcgtcaaagagatcaaagaagtccatgaacttggtgttgaaatggcgatcgtagtaggcggtggtaacatttggcgtggtcagattggtgcacaaatgggcatggaacgagcgcaagcagactatatgggaatgttggcaacggtcatgaatgcattggcgttgcaagacactcttgagaacgctggcgtaccgactcgcgtccaaacatcgatcgaaatgcgccaaatcgcagaaccttatattcgccgtcgggcagaacgtcatctagaaaaagggcgtgtagtgatctttgctggcggcacagggaatccttatttctcaacagatactacggctgccttaagagcagctgaaatcaatgcagatgtgatcttgatggcaaaaaataacgtcgatggtgtctactcagcagatccaaaaatcgatcaaagtgcagtgaagtttgaagagcttacgcatctagaagtgatttcgaaaggattgcaagtcatggattccactgcaagctcattaagcatggataatgatattccgttagttgtctttaatttaaatgaacaaggaaatattcgccgtgcaatcttaggagaacatattggaacgacagtaagggggaaatagaatggctgacaaaattttaacagaagcaaaagataaaatgaaaaaagcagcagaaaacttgcagcgcgagttaggacaaattcgtgctggccgtgcgaacgcaagtattttagaccgtgtgatggtaacctactatggtgttccaacaccactaaatcaaatggcatcaatcacgattcctgaagcgcgtattttgatgattacgcctttcgacaaaacaatgatccaagaagtcgaaaaagcgatcatgcaaagcgacatcggtatcacacctgctaatgatggtacagtaatccgtttagtcattccgcaattgacggaagagcgccggaaagaattggcaaaagatgtgaaaaaagaagcggagaatgcgaaaattgctgtccgtaatatccgtcgtgatgcgatggatgcttacaagaagcaagaaaaatctggcgatatcacggtcgatgatttaagagaatcagaaaaagaagttcaaacattgacagacaacagtattaaagaaatcgatcagatcgcagctgaaaaagaacaagaattattagaagtataagaagcaggggcgcacaagcgccctttttttattcctaacaaagagaaaatgtttttgtttttctttaatatagatttctttttttacttttcataggcaagaaatatgattattgttataatgaaaaagatgaattttacgaaatggaagaggagcgaatcatatgttgcgtttttttccacaaaaagacaaatatgttaaggaagaaactgaatacgaacttgatccggcattacctgtgcctcagcatatcgcgatcattatggacggaaatggccgctgggctcagaatcggcgtttaccgcgggtggcagggcacaaagaagggatggagacagtgaagacgatcacgacccatgcctcgcggcttggagtcaaagtcttgacattgtacgcattctcaacggaaaattggaaacgaccaaatgaagaagtcgattacttgatgcaattgccagttgatttttttgacacgtttgtaccagagctgatcaaagaaaatgtgaaggtccatgtgatgggctttactgaatatttgcctgctcacactcaagatgctgtcaatcgtgccatcgaacagaccaaggagaatacaggaatggtcctgaatttcgctttgaactatggcagtcgtgctgaaatgctgcaggcgatccaaaagctgtatgaagaactagaccacacacaggagacggtggaaatcaccgaagaaatgatggaccagcatctcatgactggtttcttgcctgctgcacttcgcgatcctgaattggtgattcgaacgagtggtgaagaacggatcagtaattttcttctttggcaaattgcttatagcgagctctttttcactaaagcattatggcctgactttgatgcccaattgttagaagctgccatcggcagttttcaacagcgaaatcggcgctttggcgggttgaacaagaaggaggacaaaaagtgaaacaacgtgtgatcaccgcagtggtggcattagcattttttttaccagttatttatgtcggtggaatagccatcgagttgacggcagctttacttgccggaattggtgtgtttgaattatttcggatgaaaggactagcggttctcagttttgaaggggtgttatcgattcttggggctgtgatcttagtcttacctaaagatccttggtttgctttcttaccagcaaatacagataaaagtgctttgttttatctgattgtcttgttgttgctagggatcgctgtcgtttccaaaaatatgtacaccattgatgaagcaggtttccccgttttagtcagtctgtatgtgggtgtcggctttgaacgtttcttgacggctagattagtaccaaacggattagttgtgctgatttttggcttgtttattgtttgggcgacagatattggtgcttatatggttggccgccgattcggcgcacataagctatggccggagatctcaccgaacaagaccgttgaaggggcattgggcggaattgtttcggcagtcgttgtggcagctctttatttgttggcattcccaggcaacgattactttggccatggaagtctgatcatgatcgtattgacgattattttttcgattgctggtcagtttggtgaccttgtcgaatcagctatcaagcgacactacggagtaaaagattcaggcaatattttgcctggccacggcgggattcttgatcgttttgatagtatgctgtttgtttttccaatcatgtacttattaggtgttttctaaagcaatcatttagttagtctagataaacgagcaataatcacttgcttgactagataagtgctagatcattaatttgtttgatcagctccgcagaaagaagacaatttttaacctcattttaaccttatttcaacctctaaatgaagcctgttttcacgggaccagacatttagaggttttttagttctcgactacttggcggtcgaagcttttttgacggacccctgtgaagaatgcgaggataaggaaaaaagaacactcttcctgttaaggaatgtgttgagagaaagagccacagtctttttatgcgtgttagagcttggttctttaaattcttgttacaataacgccggaagttcctcattaggtgtgggtgtgataaaataaagaaaggtttcccctttagcaagagggaacagtgaaagcgaggaaacagaatgaaaacgattcttgtgtttattatcatattttctgttgtggtcgtaatccacgaatttggacactacttctttgccaaacgtgcagggattttagttcgggaatttgccattggaatgggtccaaagctttttgcccatcaaggaaaagatggaacgacttacacgattcgaatgttaccattaggtggctatgttcaaatggcaggctggggcgaagatgagacagagctgacaccaggtatgccgatctcacttgtgcaagacaaggatggaaaagtcatcaagatcaatactagcaaaaaggtgcagttgcctcatgcgattccgatggaagtggtagactttgatctcgaagaaaagttgacgattgcagggtacatcaatggaaatgaacaagaaaaagtcgcttatgcggtcgatcatgatgcaaccattattcatgaagacggtgtggaagtaaggattgcaccgaaagatgttcaatttcagtcagcgaaactttggcagcgaatgttgaccaattttgctggaccgatgaataacttcatcttagcttttgttttattcacagggttagtgtttgcacagggtggtgtacaagatgtgaatacgaccagcatctctggtatccaaaatggttcaccagccgctgaggcaggcttgaaagatggcgatgagatcttagcagtcaatggcaagacagtatccaactggcaggaattgagcagtgagatccaaaattatcctgacacgaagatcccccttgaagtgaagcggggaagtgatacattaacgattgaagcaacgccagaagggaaatatgctgaaggagaaaaagtaggatttatgggaatcagtcctggcttgaaaacaagtcttggtgacaagctattaggtggcttgaaattgaccttcaacaatgctttactgattttccgagctgtcggtaatttgatcgtacaaccagatctggacaaattaggcggtccggtggccattttccaattgtcctcacaagcagcctcacaaggggtagcttctgtcgtcatgatgatggcggcgatctccatcaacttaggaatcttcaatttgttgcctattccaggattggatggcggcaaactcgttttgaacattcttgaaggtgtccgaggtaaaccgatcagtcaagaaaaagaaggaatcatcacgttaattgggtttggttttttgatgttgctgatggtgttagtgacttggaatgatattcagcgctttttcttttgattagaggaagcagctgatatgggccaagcagggtgtatggtatagcaaagtgtttgcagcaaaggagaaaaaaatgaagcagtcgaaactgtttattccgacattgcgggaaataccaagtgatgcggaaacattgagtcatcaacttttagttagagccggttatattcggcaagtggcagcaggcatctacatgtatttgcctttagcccagcgggtgttggagaaaattaaaaaattgatgcgggaagaattagccaaaattgatgcagtagaaatgacgatgccagttttattgcccttggaactatggcaaagtactgggcgagacgggctttatgggcgctcactgtatcagttaacggatcgaaacgagcgggagtatgtcttggggccaacccatgaagagccttttacggaattgatcaaaagtgagatctcttcctacaaacgtctgccgatcagtttgtatcagattcagtcaaaataccgagacgaacaacgtccgcgcttcggtttgattcgcagtcgcgaattcatcatgcaagacggctactcatttcatgccgatgagtcaagtttagatacgacttatcgtcggtatgaagcagcctatcacgcgattttgcagcgttgtggtctggagtatcgcgcagtgattggtgataacggtctgatgggagggcatgattccaaagaatttatggcactgtcgcagattggtgaagaactaatttgctactcaacggaaagcgactacgtggcgaattggaaaatggccacaagtttgtatgtatcaaagaaatctcacgaaacctttcttgagcgcgcagagttgcaggttgatccatcttattctctggaagaagtagctgcagcttgtgagagtgacttgactaagatcgttcagtcctttcttttgtttgctgatggagaaccggtcatgattcttctacgtggcgatcatcaattgaacgaagcaaaagtcaaaaattttctagaagccgatcaattgaaaatagctacaccagaagaattacgttgtcatctgcaaactgaagcaatcagtcccattgagctgccggaaaatgtccgcttatatgctgatcagcatgtacaagatttagcaaatgtgatcgtctttggaaatcaaccgggccattactatcaaaacgcaaatgtaggacgagatttttccccattggcatttgctgattttcgattggtgcaagaaggtgatccttctccagatggcaaaggggtcctaactttcacacgaggaatcgaagttggccacattttcaagctaggaaccaaatacagtgaaagacttggtgcgacagttgtcgatgagaacggtcaggagacgccagtcatgatggggtgttatggcatcggtgtatctcgtcttctatcaacaatcgttgaacagcacggcaatgaagagggaatcgattggccgaaagagattgcaccctatgatatccatattattcaaaccacaatggaagactcgtatcaaactgctttgtgcgaggaagtagagcaagcgatgcttgctgtcggttatgaagttttagtagatgatcgcaacgaacgtgctggtgtcaaatttgcggatgcggatttgataggctgtccgattcgattgaccattggcaacaaagcgacagaagggattgtcgaaataaaaatcaaacacacaaatgcaaccgttgaagttcgtaaagaggaagtggctacgacattaacgatcttgttgactgcatctgaatgatccgtgacaaaaatcgaggaagggggagccctttctcgattttttaatgaaagacaaaagaaaaagaggtatactaattaatactgagaaaaaggaggatggtcaattgtcaaaagaaagagagacctttgagattttattagagcaaatcaatgctggtcctgatttacgccaacatcctttgatacagaccgctcaaatcaaacaagtcgtggtccatcgccagtcaaaagcttggacattttacttgcagtttgatacattgctacccgttatggtgtatcaatcgttcaaacaacatttggaactggcctttaaggaaatcgctgcggtgcgaatgatcattgaagccaaggataatgccttcgatcaacaactgatccaagagtactggccattagcactcgcaaatcaaaactgtgatcgtccactagtacagcaagtcattaagaatcagctaccggtagtgaatgagaaaaaagtgatcctgcctgttaccaatgaagcggtaatcgcgattttgcagcaacaatatttaccaatcattgaagaaaactatcaaacatttggttttcaaaaatttcgtatcattcctgaaatggatgccgaacaagcagaagaagctttaaaagaattggaagctcgtaaagaagaacagactgctgctttccaattacaggctgctgagaacttgatcgcccatgaacagcggaaaaaagaagtgaaagctgttgaatttgacggtccgattgcattgggaaggaatattccagccgatgaacccgttaccccaatgattaatatcattgaggaagaacgccgtgtgacgatccaaggatatgtctttgataaagaagttcgggaattacgttcaaagcggaagatcttgattctgaaaatcacggattatacgtcatctttcagtgtcaaaaagttctccaataatgaaaaagatgaacaaatctttgaggcaatcgccaaaggcagctgggtaaaagttcgcggaagcgtgcaggaagatacctttatgcgagatcttgttatgaatgctcaagacttgattgaggtaaaacacgagattcggaaagactatgcacctgaaggagaaaaacgggtggaactccatcttcattcaaatatgagtacgatggatgccacgaataatatcagtgatttagttgcacaagctggaaaatggggacataaggcgatcgctattacggaccatggtggcgcgcaagctttcccagatgcccatcatgcgggtgaaaaagctggtgttaagattttatatggggttgaagccaatatcgttgatgatggcgttgcagtggcttataaccctaaaccagttcctttgacggatgccacgtatattgtgtttgacgtggaaacgacggggctatctgccgtttatgatacaattatcgaattagcggctgtccgcatgcataaaggcaatgtggaaggctcatttgatgaattcattgatccaggacacccattgtctcgcaccaccgtagagcttacagggatcacggatgaaatggttcgcggttctaaatcagaagaagaagtattgcgactctttagagagttttctgaaggagcaatcttggttgcccacaatgcttctttcgatatgggctttttaaatacgagttatcgaaaatatgggattccagaagccgaaaatccagttattgatacattagaactggcacgttacttatatcctgagttcaaacgttttggtctaggcgtcttatctaaaaaattcggcgtcagcttagaacagcatcaccgagcgatctatgatgcggaagccacgggccatttagcttggatctttgtcaaagaagccatggaaaagcatggcatgctgctgcatgaagacttgaaccgccatgtgggaggagagaactccttcaaagcggcgcgaccattccatgcgacgatcttggcgaagacgcaagccggattaaaaaatttatttaaattgatctcgatgtcgaacgtgaaatatttccatgacaaagtcccaagaattcctcgctcggaattggtgaagctgcgggaaggattacttgtaggaaccgcctgtgacaagggagaagtctttgtcgccatgatgcaaaaaggggtggatgctgcccgtaaattagcagagttctacgattatattgaagtcatgcccaaagaagtttacgctcatttgattgagaccgaacttgttaagaatgaatcagacctagaagacattattcgcaacctgatcgagatcgggaacgaattaggcaaagtggtggtagctacagggaatgttcattatttgaatgaagaagatgcgatctatcgtaagattttgatcaattcaatggggggagccaatcctctgaatcgccatagtctcccagctgttcactttcggacgacagatgagatgctgaccgcttttcaatttttaggcccagatacagccaaagaaatcgtcgtgacaaaccccaacaaaattgcggatatgtgtgaaaaggtcattccagtcaaggatgatttgtatacgccaaaaatcccaggttccgagcaagaaatcacagatctaagttacaatcgtgccaaagaattatatggggatcctttgcctgagatcgttgaaaagcgattgaaaaaagaattagattccattatcggaaatggcttctccgtgatttacctgatctcccaaaaactggtacacaagagcaatgaagatggctacttggtgggctcgcggggatctgtcggttccagttttgtcgcaacgatgacggggatcactgaagtgaatccattagctcctcattattattgcccagactgtcagtactcggagttttatgaggacgggtcttatggttctggctatgatatgccagaaaaaaaatgtccgaaatgcggcacccgactaaacaaggacggtcatgacattccgtttgaaaccttcttaggtttccatggagataaagtccccgatatcgatttgaacttctctggggaataccagcccgaagcgcacaattatacaaaggttcttttcggagaagattatgtttaccgtgcaggaacgatcggtacggtagcagacaaaaccgcattcggttttgtaaaagggtttgagcgggatcacaatcttcattatcgtgcagcagaagtggaccgattggccaaaggggctaccggagtgaagcgcaccaccggacagcatccaggggggatcattgtaatccccgattatatggatgtctatgatttcacaccgattcaatacccagccgatgatatgaattctgaatggaagacgacacactttgatttccactcgatccatgacaatattttgaaactggatattttaggacatgatgatccgacagtgattcggatgttacaggacttatctggaattgatccaaaaacgatccctaccgatgatccagaagttatgcgtatttttggcggaacggatgttttaggtgtaacagaagagcaaatttattctaaaactggtaccttagggattcctgaatttgggacccgtttcgtacgggggatgttggaacagacccatccgtccaccttcgcagagttgttgcagatttcaggactttcccacggaacggatgtttggctaggaaatgccgaggaactgattcggcgcggtgatgccaacttggcagaagtcattggttgtcgggatgacatcatggtctatctgattcatgcaggattagatgacggtatggctttcaaaatcatggagacggttcgtaaaggacaatggaacaagatcccggatgatttgcgagatacttatctgcaagcgatgcgggaaaataatgtccctgaatggtatatcgattcttgttctaagatcaagtatatgttccccaaagcccatgcggcagcctatgtattgatggcattgcgggtcgcttacttcaaagtatatttcccaattctgtattactgtgcctatttctctgttcgtgcggacgactttgatttgatcgccatgtcaaaaggcaaagaagcggtaaaagagcggatgcaagaaatcaatgacaaaggcatggatgcatcgacaaaagaaaaaaacttgctgactgttttggaattggccaatgaaatgttggaaagaggctatgaatttggcatgatcgatttatataaatcggatgctgagaattttgtgatcgatggcaacaagctgatcgcaccatttcgagctgtaccaagtttaggtctaaacgtagccaaacaaatctgtgaggcccggaaagatggtccgttcttgtccaaagaagatctggccaaccgaggaaaagtttccaaaacattaatcgaatatatgacagacaatggtgtcttgaaagatttaccggatgaaaatcaattgtcgttgtttgatatgctataaggaagaaatttattatcaactataaaaacgattcgcaggcactatctttctcagaaatgataggtcctcgaatcgtttttttgttttatacatcgacacttttgctgcatgtcataataaaaccatcaacaataatggaatgtaaatcatataaatcaaaacggagtagcctaatgaagaagcagcaaactcttcatctccatggtaatttctaaccaggatcggcacagaattttgaacaggcatcgatgcttggatgataaagacttgcaacatcaatgaaggaacctgtatccattgaccaatcagccacacgatcaatggagagaggagaaaacgacctgcgaggacaccggcaagatccttggtcatacgtaaattcttgataccactatagtaaacgatgatcccaatgatgaacatggatagaggcgtggtcaactcagaaagatagcctcctaggcctgcaataaatttcggtaaaggaaaatcgaagagcatccagatcaatccaataataaacccaatcaatgcaggagagaagatttttttcaacacaactaaagggtgaaaggagacttttgcttcttcgaaactagggctgtctcgagcgatttcatagatcccaaccgtccaaaacaaactagtgttgacaatataataaagcaagacataaggaacagccttttcgccaaaaatagccaggttgatcggtaatccaataaaaattgtattggaaaaagtaaacatggtggagaaggatccatgatgagtgggagctacttgaaagaaacgctgccaaagtttactgatcccataagtaatgacaatggataataatggaataatcattccagaaaacaatgaaaggaattcatcgcgggtaaaattcttgatgatattcaaaaacatacttgccggcagtgagagattcaaaacaagttttgaaaaggtatctgctgtacgatttgagaaccattgcttaaaagacaaccagtagccaataaacatcaaactaaaaatcacaaaaatattgctatatgcttggaacatgaactcacctctctttcactatagcgaatcttgattccataatcaattcaatcagaaaagaataccccaaaaaagcaatcaaaaaaactatgaccgagaagagtcggtcatagttctaaatttattttcgttgttgtttgccggcattacggccttttgcatttttatgattcaagttttttggcgttgtaggctgcgtctgctgcgtaggagtgacatctttccgaggcgtcacgaccgttttaggcggattggctttcatttctgcttcaacttgcgcacgaatcttaggtttcatgatgacatttgtaataaaggtttgcaggcagctgaagaccccgccgacaacccagtataacgttacaccagcaggtgcacttaatgacatgaagacaatcatcaatggcgaaacgatcaacattgttttcatcgtttttttctgttcttctgggattccaatggttgaaatatatccttgtatgagatacgaaataccagcaatggctacaaataggaaacttggttgtcctaaggaaatcccaaagaattccgaattttgaatcccttgtgtgtaacgagcagtaaaatacaaagctgaaaatattggcatctgaatcagcagcggcaagcaaccgattccgccaaacatgctgacattattttcagaataaattttttgcatgtctgcttgtgcttgcatttgttcttcacgagtggtcgcttttttcaagttggcttgtgcgatatctacctgcggtttcaagaactgcattttttcactttggatcatcgttttcttcgattgatggatcccaagcggtaagataatgaggcgtacaacgattgtcacagcgataattgcccaaccataagaccaatcgaagttttctaccagcatggtgatcaaattacctaatggtttcactaagaaacgatagatcatgccgttttcattcggtgttccatcagagtttgtgctgacgcatccggataaagtcagtaaaagtcctaacaatccagacgagagcagccatttattcatttttgacattcttttcttcctcttcactataaatttagacaaaaataactatactaaaaaagaccgactatttcaatgtacaaaaggaaattcattgaaaaatcaatctttcgtcgtagatttagtaaccatattcaacatcaaaacttgttctttccttgatagaaggatcttcttggatctttgtacttgtcactttaccagaaggagacggtgaatctttgaccgcttcaacaaaagcgtctacctgtttctcttcgccgatagcttcgatcgttactgaaccatcagattcatttttgacggatccttggatccccatccggtccgctaacaattttgtcgtgtaacgaaaaccgactccttggactctgccttgaacttgaatgcgtatttttttcatcaaatcatccctcgtttcagtcaacctctatagtatatgatagcgtttttctaacgaaagaacaagtttcatcctttgactcatgctataatgaggcgaggtgaacaggatgaaggaaattctttcaaaaaaaaatatattgatcaaagaggtcaaaaaactcgcacaaaaaaaataccgcaatcaaaccaatacgtatataatcgacggttggcatttggtacaagaagccattgcagcatcggcaccgatcaattatctatttgttactgataaaggaatccaagaaaccggcaatcagttaaaagactatcaagacaaagtatttcgtatctccgatgaagtagctgcttttctatcagatttaccgacaccccaagggatctttgcagtgatcgaaaaagagaccgttcaagaaacgattcatggaaattggctgattttagataatgtccaggatccagggaatgttgggactatgattcgtacagccgatgctgcgggttttgctggggtctttttaggaacaggcacagctgatcgttacagcacaaaagtcttgcgtagtatgcaaggcagcaactttcatttaccgatccttgaaggggatgtgccagcattcatccaaaaattaaaagcccaagggactgctatttacgggactgaattgaataaagaggcggtttcttatacggagttatctaagaaaggaacagctgcgtttatcttagggaacgaaggacaaggcgtccatccagatattttagggttgaccgatcaaaatgtctatattcctatctatgggcaagcagaatcactgaatgtagctattgctgccggtattttgatgtacttttttgtcagttagacttttttaaggaactgttaaactcaaagcaactctttggattctcctagaattctgtctgagcagatgctatacttctatttgtaagaaataagcagtatcaaaaaggtggcaggcataaatctatgacagaaaaatggcaagaagatagcgagtatatgtcttatgtagcagatttgttagagacagaagctgtaaaaaaattagccaattatgttcaacatatgagttccacacgtttagaacattcgatcagcgtttcttattacagttataaattggcaaaaaaatggggcggcaatgctcgtgcaacagctcgggctggattattgcatgaccttttctattatgattggcgtacaaccaaattcgatgaaggaacacatgcctatatgcatccgcgaattgccgttaaaaacgcagagaaaattactgaattaagtgatctcgagcgggacattattttgaaacatatgtggggagcaaccattgcaccaccccgatataaagaaagttatatcgtaaccatggtggataaatattgtgcggtgaaggaagcatcagaaccaatgactcaagccatgaaagcaaaatggcaacaacggttttggcataaacaacgaccaacacatctctaataaaacaggcaagcgcctagaatctgtagtgatttatcagattccaggcgctttttttgtatggtggtgaaacaattggatcgtggtgctcatgattccattcaaagggcatacttacgctagtttccaaagaaaaattcgagaatagtcatcaaaaagatgatgattgcaattccgcctatagctaacgcatgtctttttttgtgcatgaacaaaatggcgatatattctcgtaaaaaagcattcggcaagtaatagaaggctgtgtgtgagccaatcccatctgctttgacatgcgcttggtcggcgtacatccctgcccggaaaatatgatagttattggaagcaaagattgcgtgatatccttctggacgtaacgaatccatgatttctttggagaatttcatattttcgtaagtcgttgtcgaattggcttccactaagatttcactttcagggattccttgagaaacggcatattctttcatggccactgcttcaggaattttttcgtcgctgccttgaccaccggacatcaaaagacgaggggctgttttcttcgcacgaaattgaagatgataaaatgcgatggctttatcgatccgttgggctaataatggagaaactttctcgccattaaggagacctgcccctaaaactataatgaagtcctggtcatagcggggatgattgaattgataaataaccgagatcgacaaaaagttaagaaaaaccacaaaaaaataaagcagcgatgccggaaaaattgtaaataaaacactgacccaacttggtaaggcatgtaaaaaggaatccgataccaacaagatcgttaaaacgatagctaaaaccaatgtcaacaggttggccaatgagtgggattctcggcgtaaaacgacgattgaattccaatagaggaaaataatcaatccatacaaaccaaaaagaaaaacgaatagaaagccaactaatgcaacagctaaaatcccgccgactaaaatatcttctgtccgataaagattaacgagcaaataaatcccaaaggtcaagatgaagacattaaaaagcaaaccattcactaaacgatgcttgtttttaaaataggaatataaaaataatccggccaaactaagcggggctaagataaaaaaactgccagtacgtaattccgaaatggacaaataggccaataaagcggcaatcgtccaacaacactcgaagaaaaagatatctgggtcatcttttttcttgcggtaccaaaaaacaaaaatcgctcctaagatataagcgatactgaaaagcccaatttgtgtaaaatccattcttttcactcctttaaatctaagaacagtatacctaattttcgaagaaaaagcttgcagatgtggtcaaagttgctgaattttcttgaattcgctacaatggatagagaagaaagaaggaggcacaagcatggaattaggtgaagtgatccgagtaacactcccagcgttttatgttgtcggaaaagaagggaaaggtcttgctgaagaaggcccttcatgggtaccggcactatgggatcttgcaacgaaagattttgaagaaatcgagtttttgctagccgatcaagaagcggaaaatctgcagttctggggattgatgagtgacggagagaactggctggaaccatggcaagagacaggacgttaccttgcgggtgtccaagtcactacggataattttccaccagtagattgggtccgttggcaaatgccagagatggaatacatggtcgtaaaaacaaatgaagccaatctaaacatgatgacagagaagatgctgagagaagttcttccagaaaataatgttcaactggcagcagctattcaggaacactacctgcctaattttcaagaaggggaagtagaactgtattttcctattgaaccgattgcgcctgttgtaaccaaagaagagttactctcttaacaaaaaacttccagtgttttagtgattaccggtcttaccggcaacgccaaacactggaagtttatttttgattaaaagagatttgtaaagaaattggcaactgatcgccagccgataacaaaaatatttgctttttcaacggctttagtagtgatcagctcagtagtagggacttctttactaccatccatataacctaatgtatctgcaggaatcgttgctgttacttttcctaaatccgttcctttggcaactggtgcagagacagtttcttcgttcattgttttgttataatcgattgttgtagtgaagtcttttggatccatatctttacgtacccaaacagaaagatcatcttttaccgctatgggaacagtaagttctttgccgtttttaacagcgaccgtttttgtatctgctaactgatcaccagcagatagaataggaacttgctcccacgcatcaaatgagtaatccatcagtttgcctgtttcggtgaaacgtacactaggattctcagcatgaccgttgacgtttaacactacggtgataatacgctggccatctcgcacagccgttccaacaaagcaagcacctgctaaatcagtggttccggttttcaaaccgtcaacaccatctttggcgttgatgaaaccaggtagcatccagttccagttgaccatctcaactggtgagtaggaaccttcaccaaatgttttggtaaccgtgctggtgacttctaatacttctgggaagtcttggagcaaatgtctcgctacgatagcgacatcttttgcagataattcattttcatcagtggaagtggaaccagggtaaaggttttctcccagataggtgttattcagtccggaagcattgacaatcttagcatctgtgattccccattcagtgagtttgtctttcatttgatcgacaaaggctggctccgacccggcaattttctctgctagggcaacgaccgcagcattagctgattgaatgtagctcgcttcataaaggtctttaacggtgtattgaacatcacgatgcaaaggaacattggacaagtcaggtgtgacactgaggtcggctgcatattgtgagatttcaacagggtcttcccaagtcaatttgccttgcttgacttgttctgctactagatacagactaatgatttttgtcactgaggcgatgcccatcggggtttctccctcttggtcatataaaattttgcctgtatcgaaatccactgaaaaagcagcttttgcatcgatagaaaagtttttgatttcttcagcggtaaatgtagtctcctcagcgtgggagatcattggtattccggcaataaaaaagagggttgctagacccgcaatcaatgaataccagattttggataatttctgcataggtaaactccttcgtttctgtatctaaatcaaaagtttaacaaagagtttcctgagttgcaatactctaacagaaagttcaaaaattcgtaagaaccagcttttttcttcttgccgaatcacaccagtgatcgctttgtcttgaaacaacagttgtttttagacataaaaaaagcttttctttaacgaacaaagaaaagcagtttttttatctaataaaactatcggcgaatatgatttcggggatcctcactttgcacttttacaggtactttcactgctcttgtttcttgctgcatcaattggcgggcaagaaacagcgttcctccaagtaatgcggctaaaccaaagattgaaaaaagtgaaacaaacgtcgctaacatagaaatcccttctttctgtttttaattaatgtggaaggtaggaatcgaacctacaccttaatctacgaacgatcatctatcactcaacggaacaccttgttcaaccacttcttattactatcatagcatgaactgtctaaaaatgctggtagaaagtctgagcattttcagaggaaatcaagaataaataatgaagaaactttgaagaaatcattcgatttttgtcaaaggatattgccaatcttctgcttcatcataaagggtgaagcgctggtccttttgttcaatgatcaaatggtaacccaatgaatctagtaaaaccaatcttgatggggtcagctcaacgatcacagtaggtgaatgtttcccatcaattgtcagtgaatgctcctctgtgatctcaatggatacagtgtctttcatttttgaagtgaactgccatttccccacgaattgttggcggggctcagttttttgcttttcttttcttaatatgagcgaactggcaacaccggtcaaaagtgacagaccaatcaacagtgaacgttttttcacattttcacatccattcctacctatgatggaactagtataccatggggaacaaagaaatcctcctactttggtcggaactttaaaagtttttaattgaccgcataatccatttatcaaaatcttacagccctcagaaaataccagaaaattgcagctgcagcggatagctgcagcaatgatgctgacccaaagcattgttccatagcttatggtaaaatcagatagaaagttttctgctttctcctactttaattgaaagagagtctttcactgagaatcagaacatcatcaattactagatcaactgatttagcgtttatttaaggaagtccggctgttttaaggccgaggtattaatggagagggaaaaagatggaatatccaaatagtcacttagcgatatttattattcgggaaaatcgctttattgcccgctgtcgattgatgtcaggggaggaagtaatcgttcacgtcaaaaatactggtcgaggaaaagaggtacttgttgctggtgcgttagtcactttgcaatactggaatagtccaaagagaaaaactaattatgatttgatcgcagtaaaaaagggcgaccaatggattaatatcgacagtcaagtcccaaaccgtttggcctatgaatccttattggacggaacgattcttttaccgcagatcacaggcaatctaactttactaaagagagaagtgacgtatcaccgttcaaagtttgatttttattttgaaacagatgtcggagaaaagggctttatagaaatcaaagggatgactttggaaaacaaacgagtgggtgcttttccagatgcgcccaccagtcgcggattgaaacatgtaagtgaactgatagatgccaagaaagaagggtactatgccgcggtattgtttgtcgtccaatttgaagacattgatgtcgcgacgatccatcgtgccatgcaaccagagctagcaaaaaaaatcggacaagcaattgcagacggaatccaagttttcgcgtataattgtcttgtggatgaaaccagcatttccattaataaagcagtaccttttgatcttacggctgcttttgaagacccaaacttataagaaaagagggaatatgaatgattcatttagggataatcggtacaaattggatcacggatcaatttgtacaagctgcacatgaaacgggacgctaccatctaacggctgtctattctagaaaactggcgactgctcagtcttttgcagagaaatacggagaagtgacttgtgtagatgatttaacggctttctttcaactagaagaattagatacggtatatattgcatctcccaacagtttgcattttgaacaagcaaaacaagggattttgtcaggaaaaaatgtgatcgtcgaaaaacctgccttttcgacaccatcagaaatggctgagatcattgaattggccaatgaaaatcaagttttattttttgaagcagcgcgcaacattcatgagaaaagttttgacaccattgcgtctgtcttaactgaacatggcaatatcattggtgcaaactttacctatatgaaatactcttcacggtatgatgcagtgttagcaggagaggagccaaatattttttctccccatttttctggcggcgcattggtagatctgggtgtttatcccgtttatgcagcactagcttggtttggcagaccacaaaatgtttattattttgcccggaaaatcgtgacaggagtcgatgggatcggtacgatcattttacgttatgaaacttttgacgtaaccattcaaactggaaaaatcggcaactctgacttgaaatcagaaatatattttgaaaatggaacactggaactaaatgcagtcaatgccattgaacaagcggtattttatgaccgtacaaataatgaaacggtattaccggtgactgcgcaggcaaatccgatggtcgaagaagctgcagattttgcagaagtcatcgaaaataaagcagatccccaattgggtgcgcgctatgaagaatggatcgaattagctcgtgatgtcaatgaagcgatctatctcatgagaaaacacgcagaaatctcctttgacgcagacaaagagtaaggaatggaatgtatgacagcaacttatttagcagaagtttggcaagaaaaatggcaaagcagcggcttttctgcgccatcactgattcaagaacgggtttaccccctcttgaaatcaggacaatcagtagtaggcgtttcaccgacaggttcagggaaaacattggcctatttactacctttattggaaactgtaaaggttggtgaaggcaatcagctcctgattttgacctcttcccaagaactggccatgcaggtcacacaggtcgcacgagattgggcccagcttttagatttgcagattttaccactgattggcggcgcaaatactaagcgacaaattgaaaagttgaaggccaaaccagaagttttggtggggacaccaggacgagtattggaattgatcaaattaaaaaaagtcaaaacgcaacagattcacggggtagtcttggatgaagtggatcaattactgaaagaaggggcctttgggctcgctagcaaaatcttgacgcttattccaaaacaggcaactcgcagtttcttctctgcaactgccaatgaggttctaaaagaaattcaagaactggcttttgaaacaccacaggtcattgatgtgacagaggaagaccagagcaaaggggtgatccatcattattatttgaattacccgagtcgtaaactagtggatgctttgcgccggttggcttacttaccagattttcagggattgatttttttcaatgaattaagtgcattaggtaatgctgaagaaaaactgctctttcatggtttgccagtcgcctcccttgcttcagaccagaacaaactgacccgccgtgcttcgcttgatgggttccgtcagggaaagatttgtgaattactaacgacagatgttgctgccagaggattggatgtcgatcagctggggtatgtggtcaacaccgaggttccacaagagaaagaatcttatcttcaccgagcaggtcgtgtgggacggatgggaaatgagggcacagtgatcacgatcgttcaagaccatacattaaaggatctaaagaaaattgccgcacagctggatctaacgctgcaagaagttttcttgcatggaggtgcgcttcacacagagcgtccggaagttaaaagtgaacctaaaaaagagcagagtgtgcagaaaaattccagaaaaacttctgaaaaattacacactatgccaaagaaaacgaagaaaaagcaaaaaaaccaaaaagataaaggcaaaagacgccattgagcgtctttttgtgttaccattaacggtggttaattactagtgtgtaatattgaggaggcattttcgtgaattcaaggaaagaagaaatctttcagacgatcgaactgcacaaacaaggtctgacagccttagaggttgcggagattttacaaatcgatcgcagtaatgcaagccgttatctcagtgaattatttaaagaaaataaaatcagcaagcgtgctggtcggccagtaatctatgaaccattgaatgaggaagttcatgtggatgtgtcctccgaggttagttttgaaagtctggtgggcgttcaagcttctttgaaagtcagtatccaacaggcgaaagcggccattctatatccgccccgtggactgcatactattatattcggcgaaaccgggaccgggaaatcattatttgcggagtgtatgtatcatttcgctgtggaatcaaaaatgctgaaaaaagatgccccatttgttgcgtttaattgtgcggactatgcgcaaaatccccaattgctatttggtcatatctttgggatccgcaaaggagcatacactggcgctgcggaagatagtcccggactaatggcgaaagccgatggcggtattttgtttctggatgagattcatcgtttgccgccggaaggccaggaaatgctctttacctttatcgacaagggagtctatcgtcctctaggtgaaagcaatcaagtgtacgaagcttctgtgcagatcatcggtgctacaacagaatcttcagaaacatttttgacgacattcaaccgaaggattccaatggccatcactttgccgaatgtggagagtcgttcactggatgaacgatatgaaatcatctccttatttatcaagcaagaagcaactcggctcaatcaacggatcgacgttgagcgagatgcgattttggcctttatgctgtatgaagcagaaggcaatatcggtcaaatcaaacgtgatttgaaattagtctgtgccaaagcatttctccattatcggacctacggcaaaaagcatttattgattcgtaaagaagattgttcactgcaagtccaaaaaggattgttgaaaatcaaagaaatgtcggaacgtctcgatcgatttttagaaggcaaaggcgattttttgagtttcgagcctggggatcaagatgttgtttggtcacaagatcctcaaagaaatatgcaggtttacaatgagattgaagagaaagtcagcagcttgatcgagacaggtgttgcaacgatcgatctggaaaatctgatttccaaggatgtggatgcctattttgaaatgtatgtagaagagctgacgcaaaatcccgttcacaaagagttgattccagaagatatttggaaactgaccaatcacctttatgatatcgctgagcaaaaattggatcgtacatacaatgaaaaagcacgttttgcctttgcacttcatcttcaaagtacattagaacgcgtaaaagaaggccacatgatcgttcatccagacttaaatacgattcggaaaaatctgaaatcagagtttcaggtggcgatggatctatcaactattattgaagaggaacgacacgtggagattcccttcgatgaaattggctttattagtatgtttctagctattcaggtgaaaaaacagatcatgccgcttgagaaggtagaagtcgtcgtcttgatgcatggaagagcaacagctagcagcatgctggaaaccgcacaggagctattggaaaccactagcggttatgcaatgaatatgtcattggatacagaagtgggcgccatgtatgaaaagttactggcctatgtttctaagaataaagataaattaagcaatggtctattgcttctcactgatatgggatcattgaactcttttgcaacacttatttatgaagaaacgggcattcggacgaaagcaatctccatgtccagtacgatgatcgtgctggaagctttgcgcatggcagagagtggacgcagtctcgaggatatctatcaaaacatccagcgttcctttgagacgatcgttcaagagcaattccgcacggttcgggaagccaaaggcaataaaaaggcagtaatcgttacgtgctttacgggagaaggtgtcgctgccaagctgtatcagcgcatctatccggtcgtcgatcaagagaaggtcgaaattattcaaatgcaatttattgagaaagaaaccttcaagaaacacatcgatgggttgctagaagaatatgagatcaaagccatcgctggcacagtagatatcgattatcaaaacattcctttcttttcggcttatgatgtctttgatgacgaacggttgaatgtgctgaagcgaatcgtttctgatgaagttcccatcgagaaaattgttcgctctcttgaaaatacccttacgcatgtcgggtctgtctaccatttcatcgagagcttgcaacgaatcgtccatcaggttcagaatcagctgcatgtgacactagaaccgactgtagatgccgggttagtgatccaccttgcttttcttgtggagagcaatttgaagaaggaaccttcccgagcatttaaggatttagcaagcttccaaaagcggtatcgaatcgagaccgatgtgttgcgaacgaacttgctgcaaatcgaaaaaaattatcaaatcaagatctctgaagatgagattgcgtatctcacacagatgttcttagaaaatgaaataaaaaatcatcatgaatccgcacacaatattagtgtgtaatgagaaaaagtaaaagtgtgtaagcgttaaattggtgcagaccattgttaaatcaaggtttgcactttttttattttggcacgctttttgctttatagtaaagtgtaaataataatttagaaaggagtgacaatgatggcgaaaaaaacgattatgctcgtatgttctgctggcatgagtactagtttgttggtaacaaaaatgcaaaaagcagctgaagcaaaaggaatggacgcagatatttttgcagtttccgcttcagaagcagaccaacatttagaatcaaaaccggtggatgttctattgttaggcccacaagtacgttttatgaaatcacagtttgaacaaaaattagcacctaaagggattcctttagaagtcatcaacatggctgattatggcatgatgaatggcgaaaaagttttagcacaagcagaaagcttaatgaagtagtgaagtaagaggaggatttttttgatggacgagcaaaatttggaagccattatgggtttgatcatgtatggcggaaatgcgaaaagtgatgcaatggaggcaattgcggcagccaaagaaggaaattttgaattggcagaccaaaagattgcggatgctgaagcatctttagtagaagcacaccactcacaaactggtttgttgacacaagaagcacaaggcaaccatatgacagtgaccttgttgacggttcattcgcaagaccatctaatgacatcaatcgcatttacagatctagcgaaagaaatcattgatatttatcgacgtatgagtaacgaataatctttgaacggatagaagtagttatttgttgattttatctcttagaaaaatcttctttggcgaatagaacttataggaggacataaaaatggatggattaacgagttggatggagaaatacattctccccgtagcagcgaagatcggtgctcaaaagcacttagtagcgttgcgtgatgcgtttattggaacaatgcccgcgacaatggctggttcgatcgctgtaatgatcaatgcgatcattcgcgatctgccgccacagttttggcctagttatgatgcaagtacaattccagttatacgtgaaattattagtattaatgggtttgtttggaatggtacactagctgtagctggattggtttttgctttttcttgggggtataacttagcccgagcataccgcgtcaatgaccttgccggtgggatcgtcggaatggcgacactgatccaaggaatcgctttttcatatagcacatctgttgcgacgacagttcctgcaaatttgatggatgaaatcaatgctggtacagcaacaactggttggtcagcaacagctgaaggaattacagctggcggctggggctggttgaatttgaaccatctaaatgggaatgcatactttactgtaatgatcatgggagcaatctcagtcatcattttctgtaaattaatgttagccaatattacaatcaaaatgccggattccgttccaccagcagtttcgaaagcttttgccgcaatcttaccggcaacgatcgctttgtatgttattgctattattaactttattgttggacaattgacggatggacaattgattatcgaccttgttcagaaatatattgctgaaccattcttgggtctttctcaaggaataggtgcagtcttgatcgttactgtttttgtgcaaatcttctggttctttggtatccatggtccaaacgtattggcaccagttttggaaggtatctggggacaagcacagttgatcaatattgatattttccaaaaaggatatgatggaaaaactggaacaagcgcggtattagcagccattgaagatggaaaagcgtatatgtgggttcgtggatcattcgatgcatttgcatggtttggtggttcaggtggaacgatcgttcttttgatcgccatcttagttttctctaaacgtgcagactatctgacagttgccaaattatcaattggacctggtatcttcaatatcaacgaaccagtcatgtttggtttgccaatcgtattgaatgcgatcatgttcattccattcattattgcaccgcttgttgctacaacaattggttggttagctacttactggggattagtctcaccagtttctcaacaagtaacttgggttgtgccgccaatgttattatcattcttagcaaccggtgcagactggcgtgcgccaatcgtcactttagtatgtatggtggtcaccttcttcatctgggcaccatttgttatctcagcaaataaaattgatccaaaattaggcgaatagccctttaatcgagaggaactgctatcgcttcatagttgaggtagcagttcttcttttcattcatttagaatacagttagaaaacagcagcaagaaaactgctcaaggaggaataaaaaatgatctcaatcgcaagtgctatgcaacaagatgcaatcaaagaattattagaaggatacaatgaagacggtgtgtcttacacatttaaagaaaaacaagggatcaaattgatttttactaccacagctgacgatgcagaagcagcagctaaaaaagcgaaagaattgattaaggcccaaccatggggatctgtgctatactttcaagcaaccgctgtttgatgtcgtaatacaactgatgtcagggacgattaaatagatagggatgaatcaaaatgataaaaaacggcttatttttgtgcagtatcgggttgcttgtgattttgtatagcatgaacccaagcaatatgcgtttagacattttcagttttactactggaattgctttgctgataggcggcggtttgttgtttatgaaaggcaagaaaaaagctgatcaatcaaatggaggacagtctaaatgaaaattgaaaaaacattgaacgttccaagtccagtctttttcgataaaataatcgactcagtgatatttgatatccgcaaggcaacaggcaaaacggtttcccgcaaacagttagccggatatgagtacgtcaaggaattttcagcttccagccgtgcaaaaatcaaaattgaagaagtcattgagaatcaagtctatcagtttcggacagagacaaccaaaaatgagtttgtcgttcgctatgagctggaaacgataaatgaaaagcagacaaaggtaatttatacggaaacgatgaagtcattcggtattttgcaacaaatgaatgatatgctgcttggaacgattctaggttattttaaacgaaaacaattcaaaaaaatgctggttatgatggaagaatcatattaaaggggtcctgtgacgccttttttgtgttttccaggtaggtaataggaggaaatcggatgagtgatgtacgtagaatggatgaagcaggcccacaagaagttttggatttagtggcttatgctttccaatgggaattaagtgagaaaaataaggagcgttatcgcttactagcagagaattcatggaactatggttcgtatgatgatcaaggaaagttggctagtcaaatcatggccacaccttttgccattgattttcatggaacaagctatccgatggcaggaatcggttttgttgcgtcatatccagaatatcgaagtcagggaagaatcgaccgcatcatgcgccgcatcttggaagattgttatgagcagggaattgtcctttcctatttagcacctttttcttttcccttttatcgtcgctatgggtatgaatacgtctttgaacgtatggtctatgacgttgctgctcatgaatgggccgatagtcccaaagtaacaggttcgattcagcgtctgccatggtcagaggctaaaagtgtgatccacgatatttatcatgcgatgccaagacacaaaaaaggcggattgctgcgagcagattggtgggaaacgatcaaatttacgtatcgtaagccgtatacatttgccatttaccgcgatgaagctgggaataataccggttatttagtttatacgattcaagaaggcaaattcatcattgaagagtggggatacttaaatattgaggcttatcacggattgaatcgattgattgtctctcatgccgattctgttgcccgaatcatttatcaaccaggttatgacaatgatattcgccaggcaattgctgccaaaccaatagcacactatcaggtgagaccggatatgatggcgcgggtagtcgatgttcatcgctttttggcgcaatatccttttacttatcagctaaatggagcttttgctattgagatccaagaagataaatatgcgccttggaacaatgggatttatgaaatctctatcaaggacggtcagcattcagtcgaaaaagtaacgcagacgcaacaaccaatagtaaaaacaaccgtgcagcgttttgtccagttatttatgggataccaaacagttgatacaatggttttcttggaacaattagtggtaaatgatgcagcaataaactgcatcaagtctaatcttccaataggaaaaccaatattagaagactatttctgatttatcgagtcgtccaaccagcaaaatacctgatggttccctcgcgttttaggtaggaatcctttaagaaatgagagcagtgatacggacagctgatggaccagatctgttttatcatctttggttttaacttgcttcttagacaagtgttctgttgcagctaagagttttttatctgataagcaaaaaactcttgtccaacaagagtttaacaggttctttcaacgttccctgccggaatcgaaccagcaactaatccttaggagggacttgttatatccatttaactaagggaacacaacaatcccattttacctgtaaattcatcttcctgcaaccctaagtcatagttatttttgttgcgggataagggaagatgaggaatagaaacccgatttatgcaatcgttttgctttatggataaaaataggcatggtacactttaggtgtaaccgatcaagtaggaggtaatgttgaatggtaaaatttgggaaagcttttttgtcgcaattaacaactgacggaatcaatggaccatttgtcacgatcatgctaaatactcacgtaggtcaccaaaatgtagagaaagatcaaatcaaattcaaaaattttgctaaagaagcaaaacgccgatttgagaagagatatcccgaccactcatggaacaaattccaggaaaaaattgagactctgcttgctgatcaggcattttggcgcagcagcaccaaaagtgtggcagtgatcttaacagcagaagaaacattgatccatcgcttgagtattcccgtggatgatcaatactatgtcggagatacaccttatctgttggcgatcatcaaaaatgcccaattcaattatgccttttatttacttgcattgaatcgggattccatgaaagtataccgtgttgaaaacaagcaagtcactgaagtggcattgcctgaagacgctcctattgacattgagactgctcttggcgaagaaatcagcggtggtggagatttcaattatagtgcacaaggtggaccaaacagttctggtgaaggcgttgcctatcacggcttcagtgctaaagacgaagaggttgagattgatcatgtcaattactaccaagctgtagacaattattttaaaaatgaatttccaaatgaggaaaatttaccgctttatctttttgcactccctgaaaatcaaacattatttaagaagattgcaaaaacaagttacttcaaaaaagatgcttgtattgcgtcatcgcctgcttcattatccccacaacaaattgccgagtgtgcgcaaaaattgatggacgatctgatgcagaatgaagtagcttcttacaacaaactgcttgaccgcaaatttatggatcaattagtggacattgtaccagcagcgaaagaaggacggatcgcgcagctctttatcgccacttcaaatttagtggatggcttcggagaagacccggatactgagtatgatcgtcggcaagtgctgaatacattggccaaaaatgtgttggaaaacagtggagaagtttctatattggagcaaaaagatgcgccggatgagaaaagtttgactgcgatcttgcggtactagtttcctaaatatccgtaaagcaccagttgaataaattagcctgtgacataaacaacaagaagaataatctgaacgatttaccaggattgcgtatcccttgtatagttgctactagaacttacaaactgtaggagcaatcgtagaatttttcggattagtgcctttgttgtagaacatatgtcacaggctttttctctaaaaaagtgccttctttgtggagaagttaagaaataattgcgttttcattttttttaagtttgcgatagtcaagaagcaaaaactgtgctataatacgaagtgtagtttttgttacggtaatttatggtagcttgtttcattttaaaacatctcccacattttcaccatatacaagtaattgcaaaatatgtgttttaacacaaggaggatttttattatggaaacaggtacagtaaaatggtttaactcagacaaaggttttggtttcatcactgcagaaaacggaaacgacgtattcgttcacttttcagctatccaaggtgaaggcttcaaaactttagaagaaggtcaagctgttactttcgatatcgaagacggacaacgtggaccacaagctactaacgtaaacaaagcttaattattgcctatcagagcagcctagctgctctttttttgtgctttcattcaaaagaaggtagagtctaaatttgtttgcattttctgtatttgttatacttgaaaaaagggggactcaggatgggactgaatgaatttattttgggactggcgaatttggaaaagattcaacgggcgccggggttctttaagtttacagaacatagcgtcgcggcgcattcttttcgagtcgcaatgattgcccaggcattggctgatattgaagagcaggcgggaaatacgatcgattggcagattctctatgaaaaagcattaaatcatgattatactgaacgattcattggagacatcaaaacgcctgtcaaatatgcaaataaagaattgcggcaaatgctttcgacagtagaagaaaagatgacagatacattcatcgaagaagagattccagaatcatttcagccgatttatcgtcgtagattagcggatggtaaagatgattccctggaaggccaattgttggcgatcgcagataaaattgatttgctttatgaatcttttgaagaaatttcaaaaagcaatccagataaagtctacaaagaaatgtttcgcgaagcagtaatgacggtcaaaaattttaatcaccgtcctagtgtgtcttacttctttgaagcggtctttccagaactattgaatgcagatttctatggaaaaggaaattttctagaagaaatcgcaaacctaatcaaaaattgaaatggtctgtgaaacaagtttacctatggaaaaaacatactaagagcagaggagaaactcatccgtcgataagttcctcctctgctcttagtatgttgtatgtttttgaagccttgtttcacaggctttttttattacaacaatgattctgctccatcaacatagacttctgtacccgaaatgtttcctgcatcttcagaggaaagaaacagcacgaggttagctacttgttctggaataccagtctcctgacgcaaaggacgttcccgttccggaaagacgattgggattttgattttttcaacagcctcttcgatagccgtattctcatcaatatttgttgaaatcgctcctggacaaatcgcattgactcggatgttgtagccggaaagctcgagtgccgccattttcatgaaagcaacttgaccagccttagatgtgctgtaggcactagcgccgaaatttttgaaaattcggttgccgttaaccgaacttgtgatcacgatactgccgccgttgatttttaaaaaaggaattgctgctttaactgtgacaaaagtactgcgaagattcgttgtaatggtcgtatcccaatcatctagtgaaagctcttcgataggggtccaggttccattgatccctgcattaacgtggagaatatcgacaccacccaactcttgtgccaacgctgtgactgcctgtaagagctcttctccttttgatacatcaaccacacgataaatcgattgaccttcagtagcttctacaaatgccttcaattctgtttcatcaatgtctaatagaccaatgactgctccttgatccagaaattgctgggcaactgctttgccaatgccggatgctgcacccgtcacgataacccttttattttcaaaccgtttcatttaaacgcctccttcttaattaaattataaaaaagttcctgacctttgtcgaaagatacggatggtccattgatttttgataggatgaacgtatgaggactttagtcctaaaatcaagtttctcgtctgattgatctcaaaatttgatttcctcgttattggctaaaacagatgtaagaggcaaagattttgtagtataatgcaagaagtgcgtaaggaggaagcgaaatgaaacccatatacgctgtggtcgaccttgaaacaacggggactgatcctgccattgatcgaatcatccaatttggctgtgttttgatccaagatggtcaggtcattaatcgatttgcgacagatatcaatccggatcgaagaatatcaaagcagatccagaatttgactcatatcaccaatcaacaagtgaaacgagcaccgtatttcgaagatgttgctcatacgatttataatttgttaacacaaacagtctttgtggctcataatatttattttgactatcatttcttaagtcaagaattaatccgatgcgggatgccgccccttgagattccaggaatcgataccgtggaattggcgcaagtttttttgccgacagaaagcagctttcgtttgggagatctggctgaaagtatcggatttgttcatgagaatccacatcaggcggatagcgatgcggaagtgaccgcggcattattgctgtacatcgaatcgatcatgcgtgaactgccatgggtgactttaaagcaaatcgcccagttgagcggtcaaatggggatgcagaccagtcagtatattcagcggatcgtcagtgaacgtaccgaagagccgcttcctgaacatttggaagaaatcgatggattggttctgcgaaaaaagagtgtgccattgtttgaatcaagctattttcaaggagagtatcctaaagttaaagcggataagatcaaatgttttgatggtcgcctcagttatcgaaaacaacaagcgcggttgatgaatgctgtttatgatcacttttctcatgaggaaaaaaatctgatcattgaggcagaaaccggcatgggaaaaaccatcgggtacttatttcctgcaagctacttagctactccaaaaaacccattaatcgtcagtaccacgtcgattttgctacagaatcagatattggctaaagacatcccattagtcaatcaagtactggaacaaccgttgcaggcaactgttgtgaaaagccatcaacactacattgatctccagcggttcaaagcaacattagaacaaccgcttgaacaaaaacagtatgcccagtaccagatgggacttttagtttggctgaccaaaactgagaccggagattttgatgaattgaatcttgtgcgtcttgatcatccgttgtttttggaaatccgtcatcgaggggtggattttttggcaaagaatcaatctttttatgagcaggattttgtgcgccatctctataataagatgacacaaagcaatgtgctgattgtcaaccatgcatttttgatgcaggaaaatcggcgacagtatccactactaccaacgagtgactttctgctgatcgatgaagtccagcatttgccggagattgccgaaagatattcgcaaaattcctttgattcccaacagttcaaacgacaatttttgcaaatgaatgaagaaggtttgtttgaagagatcaagcaactcgtcgctgaagaattcgatctttcccatttattttcattgtatatcgatgccatcaaattgattatcgatacgctagaagcctattttgaaacactcgtgatcgatggggaagaactgacacttgtccaacgcaaggatctttacgatggcagcttgcagcaagatcgtctccatcaaaaaattcatttgtattataaagaaattttagaaatccaacagcgattgcagacaaccttcatggcgacagaagaacggcgattggctcgggagcgcatcctgattgcccgcttgttcgattatttccatgatatggaggtacaggcagcgacggttcaatcgtggctgatgaattggcaacctcggtatgtccattggatcatgaaaaaagcagggactgctgcagcgatgattgaagtggcagacctgcagggaaatcaaattatcgaaagcaaatggtattcaaggtacaaacatattctttatttaggcggtacattgaaaattcctggtaacaaatcttactttgctcaccgattaggcattcctgaagtgacggtcaaaacgattccggcattttatgattatgaaaagcaagcacgcctgtttattgtcaaacaaggaatctcgattcagcaagcaacgaatgaagaatacgcgcaatatttggccgatgcattaacaccgttgctatttgaaaatttgcagccaacacttgtattattcactgctcatgaaacattgaaacgggtctatgaaaaactgcataaaaaagccttggaacaaggacgagaacttgtagcacaagggactggcggtagtcgcgagaaaatcatcaagcgctttttactggcggaaaatgggattctttttggaacagatagtttttgggaaggcatcgatttacccggtcaagcgctcaaaatcgcggttgtgacgcgcttaccatttgagaaccccaaaagaccgcttgttcaagcacgtcatgcttttttagcatcggaaggcattgatcctttcaaggaggatgcactgccaaaagcaattatccgaatgcgtcaggcgttgggacgtctgattcggtcggaaaatgatcaaggagtaatggtggttcttgatcgtcggattctttctacgaagtatggcaagcgaatacttaaaggtttgccaaaaaatctgccggtcaaagaagctacaccacaagaaatgaccgaggacatacgggcgttttttgattctggagcagaagaaacaccaaaaaaacatttttcttaaaagatagctgaaatctgctataatagagcatattatttttatggaggataacgagtgaaaacgaaagacaaagaacaacgccgtgtgatgattttactgggtgcgatcgtttttttattgatcgttatcatattctcatcaattttctacatccgttcgactcgtccgatgcgacaggcacgcaatgaagcaatcgaaattgctcaaaagtatacggatttgaaagaggtcgatcaattttattggtttaatcgtcaagcctcttcttttagtttagttggtacagatgataaagaaaataaaatcgtcgtcattattcctaaaagcggtgaaaaagtgtcagtttttaaacaatcagatggtctaacggaagaagccgctcgtcaattggttgccgaaaagcatccagaagaaacgatccagaaagctactttaggattgtttaaagagcaagctgcttgggaaatcatgacgaaagatgcttctggtgaacttcattattatttgctaggttttaaagacggcaaggaaatcaatgccatcaataatatttgatttagagaaaggatggttgacatgacactctccaaacgagcgtatcaagtagagccctcagttacattagctgcagctgccaaggctaaggcgttaaaagcacaaggcgttgacgtattgagtttgacggtaggagaacccgactttattactcctgagaatattcgtcaagccgctatccaagccattgaaaatgggaaggcaagtttttataccccgacagctgggatccctgagctaaaagaagccatcctatgctatctgcaggagttttatggcgtaacgtatgacaccaaccaagtgatcgtaacagatggcgctaaatttgcgctttatgcgttgtttcaagcagtgatcgatccagcagatgaggtgattattcctgtgccatattgggtcagctatgcagagcaagtgaaactagcaggagggcaaccagtcttcgtctatgctgcggaaaccgagcaatttaaagtaacggtttctcaactagaagctgttagaacagccaagactaaagccattattttgaattcgccttccaatccaacgggagcaatttattcgaaagaagaactacaggctattggagagtgggcagttgtacatcatatcttgattgtttctgatgatatctatggtcgtctgatttacaatgggcactcctttacgccgattgctagcttgtctgaggctattcgtaagcaaacgatcatcattaatggtgtctcaaaaacatatgccatgactggttggcggattggatttgccgttggcgatcagacaatcattcaagcgatgacggatattgcttctcaagcaactagcaatcctacagctgtcagtcaatatgctgctgttgaagcactgtcagggaatcaagactccattgaaatcatgcgtcagcaattcgaagaccgattaaataaaatctatccgattgttgcagccattccaggttttcaattagtaaaaccgcaaggcgctttttaccttttcccaaacgtcagggaagcaatgaatatgtgcggatatgaagacatcaataattttgtggaagcaattctggaagagaccggagtagcagtcgttactggtgctgggtttggtgcaccagacaatttacggatcagctatgcaaccgattgggcaaccttggaagaagccgcaaaacgtttgcaggattttgttgaaaagaaaagccgaaaagcttaaaatgctttatggaacccttattatcagattggagagaaacgtgtggaatctattcaaattttagatgcaaaaaaacatgttggcgaaacagtacagattggtgcttgggtcgcaaacaaacgatcaagtggaaaaattgcctttctgcaattacgtgacggtaccgcatattttcaaggtatcgtggtaaaaactgaagtgggcgaagaagtctttcagcttgccaaaaatttaaatcaagaaacggcagttctagtaactggtgagattcgtgaagatagccgttcgaaatttggctacgaaatcggcatcagcggcattgaagtagtgggcgaaagccatgaatacccaatcacaccgaaagagcacggcaccgacttcttgatggatcatcgccatttatggctacgttcttcaaaacaacatgccatcatgcagatccgtaacgaagtgattcgtgctacctatgaatttttcaataataatggctttatcaaaattgatccaccaattttgacagggtctgcaccggaaggaacaacggatctttttgaaaccaactattttgatcaaaaagcatatctatctcaatctggtcaattatatatggaagctgcagcgatggcatttggtaaagtcttttcattcggaccgactttccgtgcagaaaagtctaaaacgcgtcgtcatctaatcgaattctggatgatcgaaccggaaatggctttcatgcatcaagaagaaagcttggaagtacaagaacaatacgttgctttccttgtacaaagcgttttggacaactgtgattatgcattagatgttttaggcagagatcgtgccattcttgaaaagtatacgaaattaccattccctcgtatttcttatgatgatgccgtagaactattgcaaaaaaatggctttgaggacattcaatggggagacgattttggttcgccacacgaaacatttattgcaaactcatttgatcaaccagtctttattcttaactatccaaaagccatcaaacctttctatatgaaaccacatccaacaagagatgatgtcgtgatctgtgcagatatgattgcaccagaaggctatggggagatcattggtggctcagaacgggccacagattatgaattcttgctagaacaaatccgtaaccacggattagatgaaaatgaatactcttggtatttagatcttcgcaagtatggctcagttccacataccggttttggtctaggtcttgaacggaccgttacatggctatcaggtatcgaacacgtgcgtgaagccattccattcccacgcttattgaatcgtatttatccataggggatattaaaagccagcttctaggtaggaagctggctttttttggtaaaaggaagcaaggaatcttaggggaatgaaggtgcgagtttttggatttatcaaaagatcaccatatgccggaaggtgtaacttttattgaaatataacggttttgttacatttattttctttttgcttattatcaggtaaaataagaactaatgtaaataaatagaggttatttatgattaaacaaattgcaatttcgttttcaaaaatcgtttacttgtccttagttaaacttttttcactaaggagacgtcctaaaaacaataaaatcgtctttttgttaagttttccatccacaagtacctatgttttggatgctttagttgaaagatacggtaatcgtttggttatttgttataccagcaatgcgcaagaaacgattaaacgatttaatcaagaaagaatcgactgctatcctctgcagtcattttatatcttgtgtactagaatcatcccgattattaaagcgtcgcaaatgattatatgtgataattatttcgcctttctaggggggatgtcttttgatgaacaaacaaaagttgttcaaatatggcatgcaaatggggcaatcaaaaaatttggtttgcaagcccaatatgctaagaaagcaactgctaaggatcaacaacgttatcaaaaagtatatgatacgtttacgcattttgtagtaagttctccgacaatggctgaaatttttgctgaaagttacaatatcgatcctatctttttaaaattcggttatcccatgacggattattatttcaatcggaacgaaaaaaacattcttaaagaaaagaatattttatcaaaagggactaataaaaaaattgctctctatgttccaacctatagagaaaacgactatgagcttccgctggacttcgagcaaattgaagaacaaattggtgatgaatgggtattctatatccatgcccatccccatgataaaaaattaaaaagcttggctaagaaatatccatcttattttattgatgaaatgcaacatgacctaaaaaatttacttattgttgcagattgtctgatcacggattattcctcagttccatttgaattttctttagcgaatccaaatggaaaaataatttatttttgttatgactatgaattatatgatgatcttgtggggatacaagaggccttcaaagatactctggattcttcaatcgtgaaaacgccagctggattatttgaagaaataatgtcctccgaaaaacaggacttagtggattttaatgcgaagtggaatacgtttgtttctggaaatgcaatgaactatttatttgaatggattgatgaacaatatgaaaactgaagagataatgggaatttttgtggatcaaattacctatgaggatgtaatcaatgatttaccaaattatatcaatagtagtcgtaaaatgactattgtaagtgtaaacccgcaaatcatcactgaaagcaataaatttcctgaaatcgtgcgatttatcaatcatagtacacatcgcatacctgacggaattggcgtagtcttagtttcgaaattaactggtggaaaaatcaaagaaagagtcactggttacgatttaatgttgaaattattggattacgcaaatactcataagaaaagtgcttttttttatggagcaaagccagaagtcctttctgatgcagttaagaacatcaatcagcgatacccagacctgattgttgcaggcgcagtggacggatatactaagatggacgatggaatcttagttgatcaaataaatgctgctcaacctgattttctttttgtagcgttggggtttcctcggcaagagaaatggttggctaaaaatacaaatgcgcttgaggcatcagtttttcaagatgttggggggagttttgatgttttaagcggtcacgtaaaaagagctcctgctttttttattaattgtcatttagaatggttgtaccgttctttgagcaatccaaagaggattggaagaattctacagttgccagtatttatggcgaaaagtatttattggaagatggtgcatagaaatgataaaacaaattattagttttatttatcgaacgttattcaatatagtcacagcaatctttccagtaaataaaaaaatagttttatttgaaagttttaacgggaatatcccttcagataatcctttagcgatttataatgctatggttcaagacgaagagtttgcaaactggaatctttattggggaataaaaaaagcaaatctattagaagcaaaagctatgtatccagaaatgaattttctttctcgctattcaatgaaatggttatgggtagcttcaagggcgggtttttggatttttaatgcacgaatgtcaaactggtttaaaaaaaataagcaaacagtctattttcaaacatggcatgggacccctttgaaaaaattaggattagatatcaaaaatgttgtcatgcctggtacaaatactaaatcctatcaagatagctttatcaaagaaagtaagcgttgggattatttagtcgcacctaatgaatactcaaaagagatatttaaacatgcatttgctttcgaaaataattttttagatatcggatatcctaggaacgatcgtttagtacaagcaaataatgagtttatagtcaaccaactgaaaaaagagctcctaggagaaaaacgaggcaacgtttttctatatgcaccaacttggcgagatgattattttatttccaaggggaattacaagtttaacatgcctttcaaattagaaaaaatgatacaacttcttgataaagaagatttgctaattatcagaccgcattatttagtaaaagattcaatagatatagatgggtatgaaaatcaagttagggtctgtgttgatgaggatataaatgatttgtttctgattgctgattgcttaataacagattattcatcagttatgtttgactttgcgatattaaagaaaccaatgatattttatgcttatgatttggttcattatgagaatgaggttcgtggattttattttgattatgatagtttacctggaccaatttgtaaagatgaaacagcattctataatgcgataaaaaaattttatacagaaaccagtaaaaaaaatctcaatgataaaaaatatctagaattttataataaattttgctcttgggaaaatggagaagcttctctaaaagtggcagaattgatcaaggcaagtaattaaggggatactatatgagtgcagtagggaatattaagttgctgattaacaaagtattaaacagttttgtttcaaaaaatggtagtatagcgtcgttttatgcaaaattaagtacaatcgatataaagaaaaatacgatactatatgaagtcagggatggtcaatcaattgtagactctccttttgcaatttttaagtatttagtgaatgatcccgacttcgctcattatcaccatgtgtgggtaatcaatgatttagattatcctactgttaataaaataaaagcttcttataagaatgttgattttgtagtgagaaactcaaaagaatatttgaaatggcttgcgtctgcagaatatttagtgaacaatgctacttttcaatctttctttgttaagaaaaaagagcaaatttacataaatacttggcatgggacacctttaaaatatatgggatttgatatcccaggaaatcctgctcattcgcaaaatgttgtacgaaattttttaatggctgattatattctatcgccgaatgctcacacaactgaaattttttcaaaaagctatcgattagacggaatttttcctggagtgattttagaaggaggctaccctcgaatagattgcactaattctattcaacgagaagtcatcaaagaagaattaggtgagttaaacctcgtttttgatgataatttgccaactattttatatacgccaacatggaaaggatcatctatattaaatccctcaaatgatgaagaacaaattataaaagaaacctatcttttaaaagactattttaagggaaaatataatgtattggtcaaggtacatccttatatttacaagacattaagcagaaatgagcgaatcaaacatattttgattccagatagtttggatccaaatgaggtattatcaattgttgatttattgatcactgactactctagcatcttttttgattttttggttacagacaaacctattattttttatgtttgggacagagatttgtatgaagcggatagaggaatgtatctcccagaaagtgtattacccggacctgttgctgagacagtcgatgagcttattgacctgatagaaaaaaaagatatttttgtggatcaatatagacaaaattatcgtttaatgaaagagaaaatttgcaattaccaagatggtaatgtaactaagcgttatgttgaaaggattttcaaaaaaaggaaatcagaaaaaattaaggagatacttcttagaaatgatctgaaaaaacttattatttatcctggtggcatgaaaaataatggaatcacaacaagttttattaatctaagtaacaatatagattatagcaagtatgatatttctattattctgaataaacctgtttccagtgaagaaataaaaaacttaaataagatcaataaaaatgttcgaatgctatttcgtccaggaaattcactttttactagaaatgaattaatcagagattattttattcagctcttttcattgaagaaagggtggcgcttcttgctaccagagaaagcttataaaagagaggctgcgaggattgtaggaaatattgcgtttgatgttgcaattgattttagtgggtatagctttttctgggcaaaattgattgcattcatgaacagtaataagagaattatttttcaacataatgatttattaagtgattcaaaaaaaatcattaatggaaaggctccgcataaaaaaaatctacctgcagtcttttccatttattacttgttcgatcgtattcttagtgtttcaaaagagaccatggaaattaacagaaagaatttaaaagaatttattacggatggacaaattggttacacgacaaatacgattgatatatctaagataatgacaagtggatctgtagatagtagtaatccaaacgccaataatcaagaaatatctaattttagatttacaggaaacatcattgccgctaaaacctatcaagtatatacaagcctatcactgctggaaaaaggagtatatttttccaaaacaattacagaagatgacgaaatttatgtacttgcatcaactttttataatatgaaagagtatgcaaaaattacagttaatggcatttatacaggttggattgaaaaaagatttattcaggcttctagcaaaggtatccaaaaggaagaaacaataatagaaaaccgctcaatgattgctacaattaactgcagcaatgatgaaatgatttattattcaatgagtgatttgaatagtattcgctcaccacttaaatatttaaataatacgtatgcttatattagtaaagagcagaaaattaatgacaccagctactgctacattgaaaatagcaatggagaaatcggctggattaacaaaaattgtctttcaaattttcatcaaacgtttcatctaaaggctttaaaaaattattttttgaataaaaatgtcaaagaaaaaacaattgtgttagataagtttcagtctatatttattcaaggtcaattcaaatataaaacaacaattggatggactgaaccagtgccaattgctggaagcgaacaagtagccattatgtttgaaaaagacgatgtagctttatttacaaaaaaagcaacaattaatcagaaggattactattgcactaattcagcagaaggaaataaaatatggattgaagcaaaaaacattgaggaagcaagagtcaactcaatggaaattcaaagtaacttaattgatgaaagagccaagaatcagaagcggataagcggtcctaccatctcatctgactctatcaatttagttaatatgggcagattatcaccagaaaaaaatcaaatcaatttaatcaaggctatcaagcaaattattgaagatcaaaaaaatgtacgtttgtatattttaggagaaggtcctttaaaacttgagatgaagctgctaatcaaaaaacttgagcttgaagaacatgtctttctgttaggacatcaagaagatcctttttcgattatgaaacaatgtgatttgtttgtttttccttcaatctatgaagggcaacctatggtcttattagaggcgttaacgttaaaacttcctgttctagctacaaatatccctgcaaatgtttcagttttgggagagtattctacgacctacattgaaggattttccgcagaggatattgcacaagctatactgaatagaatatgcaaattgaatgatactatgagatttagtcctgaagaatacaatagtgccgcactaaaaagtttttatagagaaatagagacttgaacaatgttaaactgaaaatttatgggtaaagaaaaagttatttaacttttactagtatcaaatagaaaggtgctttttatgataataaaacaacttaagaagactaaaataaaaatctctgaacaactatctttatggttttctgaagaatacgagaaaaatgaagttgatacatcaatgatattttatgaatcaagagatggtaaaaatatgattgattctccaaaggcaatgtttgattatttgttaaacgatccttcttttaaagattatcaacatatctggagttatgtaccatcagaaattggatgggatgatttggtggaaagatattctgaaatgtcaaacgttttttttgtagaaagaaatactcaacaatatgtatcttatctatctaaaagcaagtatcttgttactaattcaacttttcagtctttttttgttcctaaaaaagagcaaatagttattaatacttggcacggaacgcctcttaagaaaatgggttatgatattgaaaatgcgaatccagctggatcacaaaatgtagttaggaattttttgtttagcaaatatattatcagtccaaacgcacatacatccgaggttttaaaaaatagtttccgactagatggaatcttctcgggcgaaattttagaatttggttatccaagaaatgacgtgctacaacgtaaggataattctgttttaaaacaattgatagatagaggaattgacatagatggaagtaaagaactgatcctctattgtccgacctggaaaggaacatctacattaaatccctccgattctctacaacaaattttggcagaaacatcttttttgagaagtcaggtgggtgaaaagtataacgttttagtaaaggttcacccgtatatatttaataaggcaaaagaagttgaggaattgaatagatatttggttccagatgatttcgaccctaattatgtattgttagtcacagatatattgttgacagactattcaagtatttattttgattttttggtaacgaataagccaataattttttattcttgggatagtgatatatatgaatccactcgaggaatgtattttgatgaaaatgaattgcctggtccaattgtaagcacgatgagcgatgtaattgattcaataaataagattgatcagataaaagacgagtacagagaaaaatatactgttgcaaagaagaagtttgttagttatgaagatggtttttcgacggagcgagtgataaattatatttttaaaaacaataggagttccgttggaagtgtcaaaaagatgttaaataacaaagaaaaaattttgatttatacaggaggtatgcaaaataatggtatcacctctagtttactaaatctattgaaaaatattgattatcaaaaatatgatgtgacgtgttttatgggtaatccaaatactagagaaaagctggcaaatgttgataaaattccaaaagaatgtcaccttattttcaaaccaggctatgctattcttactccagaagaaaacaaaacacttagaaacattacatcaaagaaaaatgtagataatataaacagcgagttattcccttggaaaggatttgaaagagaggcaaatcgaattttttctaacaacgagtttgatgttgctatagatttctcaggatatagtttttattggacgaaatatattctttcttcaaactcaaaaaagaaaatttgctatatgcatagtgacatgaatgctgacagacaaaaaatagtgaatggaaaacaagttcattataagagcttaggacaactatttagcgtgtacaatcgttttgacatgttacttgcagtttcacctgtaatggcagatgtaaacaaaaattctttgatcaacttcattcctgaagaaaaaattagttttgttttgaattcactagatttagataagctatatggtgatgatgttatatctactgaaaaaagaaatgtcaacataagaaaagtaaattttgaaattgatttaattgacaagcaagatgttattgtatgggaaacgtacaaacaagaattcagtaaaagaatcccatataaaaaagatatgaaaataaaagcaatcgcatatgcaaagtataaaaataacgaattatataaaattctaatggatgatatttatgtggggtgggttgaagcagaaaagtttgtaaaaaattatcctactatagtatcaaaagagccgtataagtcatatggatatataaaaaatgtgaaaaacaaagtattttggatagatttacctacgagtgattctagtaaaagatatggaacgactgatttttataaatatatgtatgttaaaattgttgaaaaagcaattttaagtaatggagatatgtatttccacattactattaataatgaaatagatggttgggtttatagcaatgtaataaatgaaacaattaaatttagtagaatcagaaaaatcaaaaatatttattctaattttcatagattaaaaaacccaaaacaatttccattgctgactcttaatgaagagggatacgtgaaggtaagagatatagctagtaacgatgccttcgaaaaagctgctaataatgaggatgattttgacttttctaatgtaaaaaataaagttcttaaatttaccaaaattattaaaaatcattacggagtgtattatttgatatatgatggaaataaaaaaattggttggttaaataagaacttcctaattgatctcatcgatgattgtatcgtgtcggagaaaaaagtaagtattgaaatctctatagaacaaggtacaataaagtacacagattgtttttttagtaaccctattgttaataacagttctaatacagtaatagttcattctgttattgaatccaccaaaggaactttcttttctgatggggaaaacttttatgaaacaaaagatgttgaagtcataaaagaatttggtaagtatgatctaatggggaactttgttcctatgcctaaaaatcaggattttaacattataacaatcggaagactatccgtggagaaacaacaagacaaattgatttatgcttttcaaaattttaaaaagactatcccgaatagtaaactgtatatattaggtgatggtatcttaagagaagaactgctatctattgttaaagaaaataacttagaagattctgtatttttattaggacatgtatctgacccatttacaattttaaagcaatgtcaactttttactttaacatcagcatatgaaggacaacccatggttctacttgaagcactatctctgggaataccagtttgttcaactaatatacctgcaagcaagtacgttctttcagatggaaaatatggaattctatcagattctaacgatattgatggtatagagggcatgctgtttgagtcatatagtcataagcaaaattttaaagagtttgatgcaattaagtataatatagaagcagtgaatatgttttatgaaaaaataaatagctaaacagtgaattgtaaaagaaaattctatataaaaaattgtttcgaaggagaaagattttatgaagtactttgtatctggtggcgctggttttatcggatctacattagtaaacagattaattgaagaaggtaatgaggttatcgtggttgatgatctttctatgggaaatgttaataatcttattgataacaaaagattgacatttttcaaggcagatataagggatatagaattggttagagaaatatttaaaaataatagtttctcttatattttccatctagctgcagttgcaagtgttgccgattcgatagagagaccatttgaaacacaccaagttaatatggaggctacacttgacttactggaattagcaaaagagacccagaaaaatctaaaaaggtttgtttttgcttcttctgcggctgtttatggagacgatcaagtcttacctaaatcagagatttcgagaataaagccgttgtctccgtatgcaattgacaaatactcgtcggaacaatatgtattactttataatacgctgtatgggttaccgacaagtgctgtacgattttttaatgtttatggtccaaatcaaaatccttcttctccatactcaggagtgttgtctattataacgaatcatttcaaaaaaataagaaataatgaaaaagatgtgtttacaatttttggagatgggagtcaaactagagactttgtctatgttgaggatgttttgcaagctctaaaattggtatcagaaaaagaagaagcactaggagaagtgtttaatgtagggactggcgctcctagttcgattaacgatgtacttggtatatatgaatccgaaatgaatatcaagcctataattcagtttgaagagtctagaaaaggtgatattaaggattcggttgcagatatatcaaaacttaagaaaattgggttttcacctaattatagtttagatgaaggaatagctgagtatttaaaagaagaaatacaatattgataaatgttaaatagttgtggaatggagtaaatctcaatgaaagtgacaaggtccaatagttcgaaatctctcaatacggaaaagatattctcctttatgctagtacttctttcatttgttttaattttactaactttgaattcaaatgttttttcaaataggatagacgctcatgattcttccatgtttctttatttcggaaaaggaatatcggaaggattgataccttataaagatatgtttgatcataaagggatagtattattttttattcaatatatagctaatattgttggattgggcaatatatttttgggaatatttttagtggaggcagtttttttattaattgctttaatttttctttacaaaacaagttatcttgtttcaagaaatcatttgatatgtggagttgtaatattgatttcttctggattattttctgaattatacgaaggtggaaatctttctgaagaatatgcattaacttttatctctatctcaatgtactactttctgaaagagataatcggtgattcattaaaaagttaccattactttcttttaggtctaatgggtggtttagtattttttatacgtctaaacatgatttctctttgggtagtcttttgcataggaatagccgtaagagaaattataaaaaaaagttttgtttctctttttagaaaagctttttacatttttcttggtggaatgtctattgttttgctcattattgtattctctataatgacaaattcagttgaggaaatgatttttcaaacattcacattgaacatgcagtactcttcaacatctctaaaagaacgagtggcagcgtttatattcttcttcggtttattttcagtatatggtctgcctatttggtttacagttttgttttcaaaaattgttattaaatatagagaaatagaggtggagaagcggtctgttattgttttaatcctaatagcactgattttaaatctatttacgattgttgtctctggtagaaattatcgtcattacggaatcacggaaattccttttctgattgttttacagtgcatcgcaatgggattttactcaaaaaaatttagtaggaagaaaaatcttatagttatgtttgtatttcttttttccatgctacctatattcttgccaaccgtaggtgaacgtattaataatgttaatagaaaagaaacgccttcatatcaatcggaacaattagatattgccagatatataaaaaatcattcgaacgaggatgaacaaatttatgttcatgcaattgatgcaaatatatacttacattctaatagattctctaattccaaattttttgtgcttccttcgctgaattatgaagaatttccaaagttaaaaaatcaatttacaaattctttacaaaaaaatcctccaaagtttattgttatttcaaaaaattcattcttagaggagcatccaaacgatagaaaactaaataagattttaattgaaaaaatcaaacaagattatcacaaagtagacgcattcgataagagctactatgtttttgaaaaacagtaacttaaaatcggtgagattttcatcaatacagcttacaataatgttaaactagagtacgaaaaatatttattttattccactcctcctaactttcgtgtataatggtacaagtcagtattacgaaagttaggaggagttgttttgagtaaacaacatccagaagagaagtccttcaaagacgaagttttaggtgctttgaaaaaacctcaaaccaacgaatcgtctgaacaaaagcgatcatctgttgaggaacctatagaaagtcgctctgcgacccgcagtacaaaaaagcagagcagtatccaaaagggccaaatcaaaaataaaactgttcaaaaaaacgctcaaaaagcgaagcgttcagctcctaaaaaggaagaagctggtttagatgaaaagtcagataccgttcgtaagttacagcggaaaagagaagaccgtatcgtcaatcgcatcgtcacaattgttgtaatcgcattaatcgttattggcggcgtccttggtttttcagtctatcgatatgtcacttcaggattgcagccgttagatccagaaaaaacagaaaaagttgctgttgagattccaagcggatcatcaaataaaatgattggcgagattttagaaaaagataagatcatcaaaagtggtatgatctttaattattatacgaaatttaataatctgactggtttccaagctggtaattatcagttttctccaagtatgactctggatgaaattagtgcccagttacagcaaggagaagggtcagtgacatcagatgcgaaagtgacgattcctgaagggtatgatatagaccaaatcggagatgcgcttgccaaagcaacaagtatctcgaaagatgatttcttagctttaatgaaagatgacaccttctttaataaaatgcatgaagcatatccagagttgttggatagcgcggcaaaagcagaaggcgttcgctacaagttagaaggatatctcttcccggcaacttatgactattataaaggaaacactttagaagaagttgtgacccaaatgatcgataaaacaaatactgttatgtctaaatattacgatcagatcgcagaaaaagaaatgacagtgcaagaagtgttgaccttggcttctcttgtcgaaaaagaaggtagtaaagaagatgaccgtaagaacattgcccaagtcttctttaaccgtctggcagtggatatgccattgcagtcagatatttctattctctatgcgttaggcgagcataaagagttggtaacttacgaagatactcaagtagactcaccatacaatttgtatgtcaacacaggatatggtccaggaccattcaataatccaagtgagcaatctatcaaagcagtgttggaaccaacaccaaataattactattattttgtggcagacatcaatacgcaagaagtctattttgcagaaacctatgatgaacatatgcgtttagttgaaaaatatgtaaacaatacttcgaattaatttttattaggatattagtttacatttaaaaaaaaccatggtaatcttttgtggactattcgcaaaagattaccttttgcagttgatacgaagttaaaaggagaaattaaaatggtagaaaaagtatacccaatgacattagaaggaaaagaaaaattagagcaggaattagaagaattaaagacagtcaaacgtggagaaatcattgaaagaatcaaagttgcccgcagctttggagatctttctgagaactctgaatacgaatccgcaaaagatgaacaagcctttgtagaagggcgtatcaccacattagaaaatatgatccgttttgctgagatcattgataatgaaggcgtagacaatgatgaagtatcgatcggaaaaaccgtcacgttcattgaattacctgatggagatgaagaagaatatacaatagttgggagtgcagaagcggatccattttctggtaaaatctcaaacgattcaccgatcgctcgtgcattgattggtaaaaaaatcaatgatgaagtaacaatttcaacaccaggcggagatatgctggtgaaaatcacagaagtgaaaaaaagctgattttttcgtaaaagtctaagcagaagatcctgatgatcactttctcaaagagaaaaggaccaatcaggatcttttttcggactcgcgacggatgtatgccatcgaagaatccgttatgataaaatagaatcattgggaggaggagcttacatgaaaagcccttggcgttttttctttgtcgtagaagcattattatttctatttgcggtctggcaaattttatcgaatccaccgttattgattttattgattttaggtgttgtgacgatctactttgtttctcgcagagaacgtaaaacaaattttaataattttttgatggttaccggtggtatcgccatctttatcagtcttttaaatagtccggctttgtggctgatgttgatttttgcgatcctttttattggattgaaaggtgtggaaatcactggtgtagattttacaaaaaacacattttggcgcaaaaaacaaatgatcattttagaaacagaagaaccaaagcagtttcatcctcataaaacgaaacaacaatggatcggcaatgagcggatcgggaatcaagtgtatgaatgggatgatatcaatatcgacatcttttctggagatacgatcattgacttgggaaacacattgttgccgaaaaaagaaaatatcgtaatcgtccgtaagggattcggtcgcacgagaattttagtccctgctggggttgctatcaaaatggaacatagcacctttatcggtacagtgattttcgaaggcgagtcaacaggtctgaagaatgagaaagttacgatctacagtccggattatgaggaaaacacccgccgactaaaaattttaacgaacactttgattggggatatcgaggtgattcgggtatgattgctaaattttctcgaggaatgatcgctttttatagtgcggtcactagttttttgatgatgatcttgattcttttttcgtatctttatgctagtggaaagaagaattggctgctagaagtctttcagatcaaactattctttataccgatcatttttcatttattagttgtttcgctgatggtgggcctggctgtctttctattgatttctcttttcagaaaccgccaatacgggccaatcgaagagaagctgcgattgctttcaaatggagatattgatagtccactacttgacacacctatccctcatgcgcaagaaaatcggttgattgaagatgtcgatcgagacatcaggaaattacaggtcaaaatgaaagatatgtcaagtgagcttcaacaattaaatgctcggccgcagctagtggatggcagtacaaaagaagaaatccttgaagccgaacgacatcgtttggcccgagaattgcatgattcagtttcacaacaattatttgccgcaatgatgatgatgtccgcattaaacgaacaagccatccgggacgatgccccggaaatgcaaaagaagcaattggctatggtaacggacatcatcaatgcttcgcagtctgagatgcgagcgttattgttacacctgcgtccggtcacattggaagggaaaagcctcaaacaaggaatcgagcaattattaaaagaattggaaacaaaaatcaagatatccttgaaatgggatatcgaagagtttactatgccaagctctatagaagaccaattatttcgagtgattcaagaattactatcgaatacactgcgtcatgccaaagcggatgaacttgaagtctacttgaatcatattgaacacaacgtgctgttgcgcgtgatcgacgatggtgtaggattcgatgtcgacaatcaaaaagctggcagttatgggctgatgaatatccgtgagcgaatcagtgccgttggcggcacattaaagattatcagttttaaaaatcaaggaacaagtattgaaataaaaatcccgctgcttaaggaggcataaaaatgatcaacgttttgttagtagatgaccacgaaatggtacgtttgggggtttcttcctacttatccattcaagaagatatagaggtgattggagaagctgaaaatggcaaaatcggctacgaaaaggcattgtctttacgtcccgatgtcatattgatggatttagtgatggatgaaatggatggcattgaggcaaccaaagccattctagcagattggccggaagcaaaaatcatcatagttactagttttattgatgacgagaaagtatatcctgcaattgaagctggtgctgccggttatttgttaaaaacatccactgcacatgaaattgcggatgccattcgtgcgactcaaagaggcgagcgggtgttggaaccggaagtaacaacgaaaatgatggatcgtttaacaaatcgcacgccgattttacatgatgatctgacaaatcgggaaaaagaagtgctgcttttgattgctgaagggaaaagtaatcaggagattgcggatgagttgtttattacactcaaaacggttaaaacccatgtatcaaatatattgtcgaaactagaagtggaagatcgaacacaagcaactatttatgcctttaagcatggcttgacaaaataagaatctcatcataagggtacctcctcatagtcagttgaggaggtttttgatatactagagtaggatttgtaaggtaaaggagcgtttaatgtgaagcagaattacgcgattattggtcttggaaggttcggcggcagtatttgtcgaacattgatagaatccggacaagaagtattagccattgacagcaatgaggatcgggtcaatgagtatatgaatattgctacccatgcggtggtgggcaatgcacaggatgaaatgacgttgcgctcattaggaattcgtaatttcgaccatgtgatcgtagcaatcggtgaagatatccaagcaagtattcttgtgactttgatggtcaaagagatgggggtaccgaacgttttagcaaaggcgcaaaatgaatatcatgctcgggttcttgagaagcttggtgctgatcgagttgtccacccagaacgggatatggggattcgtatcgctcacaatctagtatcaaaaaatatcttggattatattgagctttcagatgaattttcgctggcggagattcgtgtctcaaatccgcgtttctttaataggtccttacttgatttgaattttcgtcaaaaatatggattgaccgttgttgctattcgtcgaggacctggacaagtgatcgtgtctcccgcagctgattcgatcgtgcgtgagaatgataatctactcgtgattgggaacacggatgatgtggatattcttgatgaacatatgaatgattaggagtgaaaaatgatgaatataactattacagaagccgcaattgattggttcaaaaaagaactgtcagtcgaccaaggaagcggcgttcgcttttttggtaaaatctatgggaaaactcagatccatgatggtttttcagtaggaatgtcagtagataaacctgaaaatcctatcgttcaaaagacagtttcagacatgcttttttttattgaggaggccgacgagtggttcttcaaagggtatgatctacaagtcgactacgatgaaaagctagatgaacctaaatatagttttactgaaaacaattaattaaaataaagatacaatgtaacagtatgagtctatgactgaagtttagtggattccatatcgctagctttgatcatagacctgttcgttaggagatgaaaccatgttatcaattatcgtaccttgctttaacgaagagagtagcttaccacttttttttgaagagactgaaaaagtaaaagatcaggtaggcatgccttttgaatatttgtttatcaatgatgggtcatccgatcaaacactcgcagtgatgcgcaagctgcatcaagagcatccagaaagtgtgcggtacctttcgttttcacgtaattttggaaaagaagcagccttgtatgctggcttaaaagcagcaaaaggggattttgttaccgtaatggatgcagatttacaagatcctccaagccttttgcctcagatgtttgacttgctcaacacaaaacaattagactgtgttggaacgcgcagagccgatcgcaaaggggagcctaaagttcgtagtttcttttcagaagccttttatgcattgatcaacaaaattggtgaagcacatatggtcaatggcgcacgagatttccgtttaatgcgtcggaatatggtggatgcagttttagaactttctgaatacaatcggttctccaaaggaatctttagttgggtaggttttgatacagaatacattgcctacgaaaatcgtgaaagagtagctggagaaacttcttggtcattctggagcttattcaagtactcgattgatggcatcgtcaatttttctgatacgccattaaatattgcttcttttgttggcgcgttgtcttgtctagcttctggaattgcactgctattcataattattcgtacttttatttttggtgatcctacctcaggctggccttctttagtttgtatcgtattgtttgttggcggtttgcaattgctttgtctaggtattattggaaaatatattggaaaaatttttctggaaacaaaaaaacgtcccctttacattttaaaggagacagaaaaagatcaaaaataatttttgggaataaaaaagcagcgctggttgatgatcaatacccttttgttacatcgacttgatttcgaaccaattttttctcgtggataaaattgcggaagttatccataaagatggccatgaatgctttttgaaaatgtggggtcaacccggaaatatgcggggtgatcaacacattttccagtgtccatagcggatcatttgcgggtaaaggttcttcttcaaaaacatcaagagccacaaatgcgatttctttttggcggagggcttctgtcaacgctacagtatctacactaggtccacgcccaacattataaaaagaagcggatgatttcatactattaaaaaaatggctattatagattcttgtagtttcaggtgtcaatggtaagatattaatcacacaatcagctttctgactttgttcaatcaactcttcaagtggataagtttccttgaaaccatcaacggcatgccccgttgtatttatgccgacaggttgggtgccaaaaaaatttaaggcctttgctaaagcctgcccaattttacctgtacctgcgatcagtatttctttatcagataataatgaataaggaataccattgggctgccattgtctttcagcctgttttttgatggcggtaaaaattcctctggattccatgaataataaagcaattaaatgatcagtgatcgattgtgcatgaatgccgctaccattagaaagtaagatgttcttttgggcaaactgtgctagaggtagcgtatccacaccggctgaaatggcttggacccattcaagagaagcattagccagtaactttccagcccattcttctttccagccaatcgtgattgcaacatttgaccagtcgatggaagttgcttcatcatagtggataaactgatattcatcactgatttcatgaatttgtgtgataaattcatcacgaaattctctgctagataaaatatatttagtcatatttgttcctcctttattttagtgtatcaaagaacaaagaaaaaaccatgcgcaaagatctatgcatggttggatagttactagctttttaattggattttaggcgaacctttgacgccttgagtgaatagaaacagtgctgcgaataagataaatgttgtcccatcaaaatttggtacgaatagttggatcagcacactcaaaattgttggtaaagcagcactaacgattagtatcttaaggttttcaaaaaagctgtaagaaaaaagttttagttttgtatagatagttgcaataaatgtacccatgatcaatgtgattaataaatttaaaaatgtagggtagagcgctactaagaaaacaataagttgtagccaccaaggaatttgattgctgctcagtgtttcccgaatctttttgccatctaaattattaaatgctggttcattataagaaaattttaattgatttgtatctaagaatgatgtggaaagtcctgttccagggaaactgacaacaatttctttttttaatagtcccacactcaacacatttgcagtggcatctgaagcaatatcggtagcgttgcgttttccttcagggtcgaaagtaaaaatgatagagtcggtttgatagataaacccttctccttgtccattcgttgttaattgaccattttcaatcgaaaaattggggattttttgcgcaattttttgactatctcgctggaaatcctgaaagatatcattgacttgcaaagtgattggtacggctaaaataacggtagctccaagtagaaaaagaatcacttttgaaaaagcagcgtcttttacatatttgagatttgggattcgaataaatgcactttttagcatttgtatgattgtcatttgtttaactccttttatgtaactaaaaataattgtaacgaaggcagcaacagaacacaaggacttatgacagaaaagtccgattatctctaaagtgttctttgctgattaatgagtagaattggagatcgagtatggaaagtttaaaaaatgtgaaaaataaactacaagaaaaaaaattatgggagccgttaacgtatttaatttttggtggattaactactttggtcaatttagttgtttattttctctttagagaaatctttgattttcattatatgattgctaatgtgatttcttgggcagcttctgtgttgttcgcattcttcacgaataagatttgggtctttgaagcaaaaagtgaaacaaaaaaagaatcgtggcttgccttttggaagtttcttttcttcagagtcctttcgctgggattggatatggcttgtatgtatctattgattagcgtactaggaaccggtgattttatcgctaagcttgttacacaaatcgttgtcgtcctagcaaactatgttttcagcaagtttctgatttttgcaccaaaaaaaattgataaaaagtaagcatatgttttgatgaaccactttttatctgataatgttacttatgtaatcactatcactgaggaggaattttttatgtcttacacattaccagatttaccttatgcttatgatgcattagaaccttacattgatgaagaaacgatgcatttgcatcatgacaagcatcacaatacttacgtcacaaatttgaatgcagcaattgaaaaacatcctgaattaggtgaaaaatcagttgaagaattacttgctgattttgattcggtgcctgaagacatcaaaacagctgtccgtaataacggtggtggtcatgcaaatcacagctttttctgggaaatcttggcaccaaatgctggtggtgaaccaacaggagccatcaaagaagccatcgaagaaacatttggcagctttgctgatttcaaagaagaattcaaaacagcagcaactggccgctttggttctggctgggcttggttagtcatcaaagatggtaaattagcgatcacttcaactgcgaaccaagattcaccattaatggacggtcaaacgccagttttaggcttagatgtttgggaacatgcctactacttgaaatacaaaaatgtacgccctgattatatcaatgctttctggagtgttgttaattgggataaagtaaatgatttttatgcgaaagcaaaataatcattaagtaagggaattatttttaatcagaataaaactatcccaacgataaaagaaagcacgttgcatcttagcatcagcttcgtgttaaccataagttctcactgctacctttgattcgttgggggtagttttattttttgaaacatattgctaacgctttcattttcagctataatattgaagacggaagcgtcttattttaattactggaggatttacacgcatggaacatggaaaagtaaaatggttcaataatgaaaaaggttttgggtttattacagttgatggcggagatgatgtctttgttcatttttctgcgatccaaggagatggctttaagtctttagaagaaggtcaagaagtcgagttttcgattgtcgaaggcgcccggggaccgcaagcggcagaagtcacgaaaatctaaactagaacaagctgagggggacctcagctttttttaatttgctattttcggccaaatttgttatcttcagtgtattataaatagattaaaaatgagggatatttgatgaaacgagtaattacgtatgggacatttgatttgctccattatggtcatatcaatttattgcgccgagcaaaagaacaaggagactatttgatcgtggcattgtctacggacgagttcaattgggatgaaaaacagaagaaatgctacttttcttatgaaaaacgtaaacagttattagaggctattcgctatgttgatttagttattcctgaaaaaaactgggaacaaaaagtttctgacgtcaaagagtaccacgtggatacttttgtcatgggtgatgattgggctggtaaatttgatttcattcaagaagaaacagatgccgaagttgtttatttagctagaacgcctgaaatatcaacgacacagatcaaaaaagacttaaaaataaataattaatacttaaagcataaaaggtatctttaaatggtgcctttttttgtacactatttccgtttttttcttaaaatttattagatgttttttgttgtttattttgtcttagaggaaaatatgatatgatgtagcttgagttgtagcaaatgaatagaatttctttgagaatggatgaagaaagtggaaaaagaaataaaagttcgtagtactttggttacaaaggaatatgacctatacaaaaagaaatcagacaaagtgaaagcattattcaaattttatcatcgaaatgttccacgtttttgggcattaaaaggcgttagttttgaagtgcgtgcaggagagtctgtagggatcattgggataaatggttctggaaaatcaacgctttcaaatgtgatcagtggcattattcctccaacatcaggcacaatggaagtcaatggcgatacgtcgattatcgcaattggagccggattaaaatatcaattgacaggtttagaaaatattcgtctaaaagcattgatgtctggaatgaccaataaagaaatcgataaaaaaatggatgaaatcgtagcatttgccgatttaggtgattttattaatcaacctgtaaaaagctattccagtgggatgaagtcacgtttagggtttgccattgctgttcataatgatccagatattttgatcattgatgaagctttatctgttggagacgaaactttttatcaaaaatgtgtggataaaatcatggaattcaaagagtccggcaagactattttctttgtcagccatgctttaggacaagttgaaaaattatgtgaccgtacaatctggatgcattacggcgatttgcgcatgtttggtccgactgaggaagtaatggcggaatatcgcaagtttatcgactggttcaagaagcaaccgaaaaaagaacaaaaagcttaccaagataaatacaaagaaaatcaaaaggcatttaatctagaaaaattagctgaaaaaagccaagatgatagcttgctgaaagagcagcatctatctgaacaaatgattcagaagaaccttaaacgaactcctttaggtgagaagatgacgattccaactaaaggacttttgactcttgcgatagtaggaacactgttttgctctcttgtttctttcagtggcagatccattagctatgcgctaaagcatccggttgatgcaattgtacaagttttcaagtaaagataactatttctttatttagtttagatagaaaaggaagagtttagtgaaagaaattgctgcagtaataaaagaacaatttaatcatgcgggaattattttccgtatgtctcgatacgaggacaaagcaacctatcaaagccactatcttggtcttgcatggcaaatcttgaaccctgcgattcaaattggtatctattatttagtctttgggctaggagtcaatggtaatcggaaagtagatggcgtaccatttattatttggatgttgattgggatcacagcttggttttatatcaattcttcggtacttggagcgtccaatagtattcaccgacaagttggtatggtagccaaaatgaaatttccagtaagtatcttgccgtcaatcaatattatcagtaacttgtcatcttatatccctatggtagctattgtgattggctcgctcttatgggcgggagtaacaccgtccgtttattggttgcaatttatttattactttattgcgatggttattttcttatttgctttcggattattaaatgcgaccattacagtattgatacgtgactatcatattttcttacaatcagtattacgtttgttgttttatgtttcaggaccaatttgggatatcaataatcgaaatatgccggaatggttaattaagctattacgtttaaatcccttttattatttgattgaaggctttagagatgcctttttatcacgtggttgggtttgggaaaaaacgacctacaccttaattttttggggaatgactttaacactattgataataggtagtcatctacacatgaagtttagagcgcgatttgtggattatatttaagtataaaaaaactatttttcaattaatacaaaaaactatccgaaggaatgaaggggtctgttaaagcgtgtctcttactttccttaggatagtttttttagatgtgttaatgaatagggatgtacgccgttaaaagttaaaataacaaattctttatcgtttcatttttgttgcaatcgtgttaagattctgtaataaaacagaagcaagattgctgaatttgtaaaattgtggcaaaatttaaacgattacctaataatgttgtgatagaggtgtaggatgcgtttatatcaaaaagtaattttaggattgttgggcttggtggcagtaagtattgtcggtgtcactgtctatggaatgaaagtatacgatgatacgaataaaacgttcaataatattacgcaaagtgcggatcgtaagacgaaaaaacgtgaaacggcagtaagtattgaagatagagaacccttttcgattcttttgcttgggattgatactggagcgttggggagaaccgaacaagggcgttcagatagtatgatggtcgttacggttaatcctgccaagaaacaatcaacgatcgttagtcttgaccgtgatatctacactcaaattgttgggtatggcatgttggataagctgaaccatgcatatgcctttggtggcgaagcaatgtcgatggattccgttgaaaatctgttagacattcctattgaccattatgttacgattaacatgcaaggtatgcgagatttgatcgatgcagttggaggcatcgaagtcactaataaaatcgattttactctggaaggagtgcatgtgcctaaaggaaccattactttagatgggaaaaccggtcttgcctatgcacgcatgcgaaaacaagatccggaaggcgacattggacgtcaaaaacggcaaagagaagttgtcactaagatcgttaaaaaagtaatgagcttggatggcgtcagcaattatcaaaaaatattaaaagctgttgaaaagaattcaaaaacagatttgacttgggatgacatgatggatatcgctaccaattatttgcctgcgttcacgacaatcgatcaagaacaattgcaaggtgaaggccaaatgatgaatggggtctattaccaattattaggtatcaatcaattgctggaaatgcaaaataaattgaaagaacaactgaatcttcctaccagcgagactttgtctcaaggagatgaacatactgatggttatacaaactatcaattgtacgacgatacgaattacaatagtgaagaaaactcaaatgagaatccaggtgaaccgtcagacatttatgatgatggagccgggtatcaggaagatactggcgattactctggatattaataatgaaaaccaaagcaaacggtcattgatcgtttgctttttacttttccacagatggaagttagaaaaatgtgtttcacgggattaaaattggaaaagattaagaaagcttaaagtgtagcagattttttctcaacaaaaaaatctttttgcgtaactgtgaaacattacagtggatgagaacgaattcttataattttctctaaggatacttggataattttgatttcttctgtttatattgaaaatttttggtaaaataagacggtaagcagtttgtaatgagaggatagaagagatgaagaatctaaaagataaagtcattaagaatatacgaaaagggcctgaggagcctaagacaaaatcttatcgcaaatcccatgttccctttcgattgaattttctcttttttgtgatttttggtctttttgttgcgttgatcgtgcaattaggttatttacaaatcgtcaatggtgataatattgagaagcaattgaaagcttcatccgtggtagaagtcaatggcagctctccacgaggaatgatttatgatgcatctggcaaaccgcttgtcaaaaatcaagccaatgcagccattacctttacaagaggaaataagatgacagctgaagatttattgaagactgcacaaaaactagctacattgatcgatattccaatcgataagaatctgacagagcgggacctaaaagatttttggttggcagatcctgaaaatttgaagaaagcgcaagatcaattaagttccaagcaaaaagcgctcggggcttctgatcagtatgcggcaactgtcgataaagtaacggatgaggatattgcctttaatgatgatcagttaaaagtagcttccatttttaaacgaatgaatagtgcacaatctttaagcactgtttatttaaaaaattctgatgtatctgatgaagaactagcaattgtggctgagaatatgaccgaacttcccggagtttcgactggcacagactggactagaaaaattgttgaaggcagttcattggcaagtttgatcggaactgtgacaacagaagaacaagggatccctgaagaaaatttggatgaatatctagcgaaagggtatgctcgtaatgatcgtgtaggacgaagttatttagagaagcaatatgaagaagtccttcaaggatcaaaatcaaagtctcaaatcacattagacaatagcaataatattgaaagccaaaaagaaatctatgcgggctctaagggagataatcttgtactgacgctagatgccaagttccaaaaagaagttgatgaaatcttacaagataactttaagtctttgatggattcaggagctgcagaatactcgcctggagtctatgctgttgcgatcaatcctaaaactggcgggattttggcaatgtcaggttatcaacatgaggcagaatcaagcaaattgcaagagaatgcaatcggaaccttcatcaatgcttttgttccagggtctgtagtcaaaggtggtacgttagcagctggttgggaaaatggtgtcttgaatgggaatgaagtcttatatgaccaaccaatccgcatcggctctgatgtcaaagcttcgatctttaacccgacaggagcaaacaaccgcaatttgtcagctgaacaagccttagaagtttcttccaactcctacatgatgcaggttgctttacgcttgatgggcattgagtatcagcctggaatttcaattccaacagttgatcgtcaaacagaagcctacagtaagctgcgtacagcctttgcctcttttgggatggggacgaaaacagggatcgatcttcctggcgaagcaacagggatcagcacacctgtcgacaaattagatacggtcagtgatggcggtaagatcctggacttagccttcggacagtttgatacctatacgacattacaattggctcaatatgcagcaactgtggccaatggcggccaacgattgcagccacatatcgtttcgggtatctatgggaatgatgaaaccggtggtttaggaagcttgaaatcagcggtagaacctaccgttttgaacgaagttggtttaactactgatcagatgaaaatcattcaaaatggattttatgatgccgttcatggaacagatgcttgggctacagcaacaggactagcttctgctaaaatggaactttctgcgaaaacgggtactgcggagacaccgattgtcgatgaaaatggcaaaaccatcaatctggtcaacctaaatattgttgcttatggaccaagtgatgatgcagatatagcagttgcagtggttttaccacaggttaaatcttcaactacttcgcatccaaacgtaaaaatcgtgaaagaaatcatggatgcttactatgatttatatatgaaataagcaaggcataatcgttgaatgagtaagagggagttgatgaacggttcgttcgctgatgattttccaaatcagtgaaggacggttcatcaactttttttatagcaaaatactttctatcggaattattaagagattatcaataattcggagagaaacctcttttttagtaagtgggtcttgctatttttggttgaatggcatagaatactctcggtcaacaagaaatgaaaaagcaggattggtttcaatcatttttcattttaactgacttctattataattgactagaattgcagggggctatcatgacgaagcaatgtttaacgaaacaagaattgatggaacgcctaggggagttctcaccagcagaaaaaaaagaaatccgcgaatatttgcaacggaagaatccattgctgtttcgcaaatttgaacgcatgaaacatgaattatttcgtctagaatcaagacggattcaatgtgaaatcgaaaaaaatgaaaaggagttgaatcagctcgatcataagattctcatgaaaaaagaacattttcttgagttattaatcgcaattcgaaagaaaagaggataatggatggaatttattgaacttatcatcatcatcgcgatcctcgtgaccttttcaaatattgtcagcaaaatactgccatcagtaccgattttcttcattcagattatcttaggcattctgctaggattgactgaaatgggacaagaaatcgcattcgaaccagagatgtttctagtgatgatcattggaccgctattgtttcgagaaggagaacgagccgatgttccggaaatcttgaagaacagtaagatcgttttgtttctggcctttggcggtgttttgctgaccttatttgcagtgggaacgacactgcattggctgatgccatcgattcctttggctgcttgttatgcttttggcgctgccttaggaccaacagatgcggtagccgtctcatctttagcgaaacgcttaaaaatttccaagaacatcatgcatattttagaaggcgaaggtcttttgaatgatgcttccggggtaacagcgctccaatttgctatcgttgctttagtcactggtagcttttctgttatgggggctggctttcaattgcttttttcgagtattggcggcggcttgattggttacttgatcgtttggttaaaacggcggatcattcgctttattgaaaaaatatctgcccaagatgtcactgtttatctgttgatcgaactactattgccttttgcagcctacttgattgcagaaatggttggagtatctggtatcattgcggcagttgttgccggtgtagcgcaagcacaaagaagacgacgagtctctttgttcgatgcggaactagccaatatctctgaaagtacgtggtcaacaattgtatttacgttgaacgcccttgtttttttatttttagggattgaactttcgcaagtattttcacccatttgggaaagcaattcttatgcaaacggtcatttagtcttgaccatcgtagtagtaacgctcgttatcttcttcattcgtttcttattccttcttttttattatcagtttttacaatcaaaaaaaatcgtggacttgaagcaagtagctttgttgacctttggaggggtcaaaggaacggtcagcttagcggcaatttttatcttgcctgtaacgatcaacggtgaccaatttgaagcccgcagtttgctcttatttttgacggcttgtgtcatcttagcgactttagtgatcagtgtacttgtcttgccctatttggcagatggtgaagctgccgaatctgttgatttcaatcagttgctgattttagaagaagtcatccagatcttggaagaagaagagaaagaaattacggatgccaaagagcgcttagcgacagatgcagtaatcaatacttatgaaaatcgacgctgggaattgtatcgcaatagtttaactgattctgaaaagcaagagatacaggaaattcaaggattgattctatccattgaacaggatggtttggatgaagcctaccgaaaaggtgaggttagctccaatgggtatcgcttttattcccggttcatttcgcagcagcagcattcgttagcaaaacagttcttgtcttttttcagtttttggcttttgatcattcaacgttttgtacggatcatttttcatcccaagctgttttggcagcgccagcagcagctgaaggatgcattgaaacaaagagatatatcagaagtacaaaaaatctatatcaaaaacagtgattatatttttcatagtttaagcaacttagaagatgtctacgattcatctttgatcaacttctttatacgtcaaagggaaatgagcttaaagcgttttgagcataataacttcattgagactatcatgattgaacaagaaccgatttttgtcaaaaaagttttacgaggctattatttagaacgaaaaacgatcgatgaatatgaggtagccgaaaaaattccaacgatctctgcaaacgaatatcgacgcaacgtaaatctcttggaatcttatgcgatggctcgcgcagatgaacagccgaaacagcgaatgtttcgtagataaaacaacaacttcttcgtctcagggttgagatggagcggttgtttttttcttttttcttaaagaccctgtcatgcttatgtggtacaatgggcgaagaaaaatagatctcaggagggattctgtgaaagaattaaaagtaagtgagcttacaaaaacttacggcgataaaacattatttgatcagctttcttttctgatacatgagaaagaccggattggcttgattggtgtcaatgggacaggcaaatcaagtttactgacgatcttggctggaattgaagccggagatggcgaccgtccctctgtttttaaaccacaagattatcgaatcggctttttggcgcaagaaagtcaattaaaagaagaattatcggttgttgatgcggtcttccaaggaacaagtccattaatcaaaaccgttcgtgactatgagaaagctttgattcagctggaacaaaatggctcagatcctacagtgcaagctgcctacagcagagcagaagaagctatgaataaaacagatgcttggaatacggatacaacggcaaaaatcattttgcagaaattagggatttcagatttaaaacaaccagtcaatgaactttcaggtgggcaaaaaaaacgggtggggttagcgcaagtgttgatcgatgaaccggatttactattgttggatgagccgacgaaccatcttgactatgaagctatccaatggctagaaggctatttgaaaaactatcgcggcgcactgatgatggtcactcatgatcgctattttcttgaccgggtagccaatcgcgtgtttgaactctcttttggtaaactttatgaatatcaaggaaattacgaggactatttattagccagagcagaaagagaacgtattgaagaaacccaagaagaaaaacggcaacagttatataagcacgagctggcatggattcggacaggcgccaaagcgagaacgactaagcaacaagcgcgaattgatcgtttcgacgatttgaaagagaatatgaaccaagtcaagcggaatggagaagtgcagattgatgttgcgacctcacgtttaggtaagcaagtgctggaaatcaaagaaggtagttatgcaattgaaggcaaaccaattctatctcaatttgatttattgattcagtcgcgagaacgtttaggcattactggtgagaatggtgcaggtaaatcaaccttgctgaatgtgttggcgggacgtctctcattagattcaggaacacggattattggctcaaccgtcaaattagcttattatacgcaaaccaatgagacgatggatccggaacagcggatgattgcttatttacaagaggcagcagaagaagtagaaaaaacagatggtgcccatgtcagtgtagcggaaatgctggaacaatttttgttcccccgtttcatgcacggaacaaagatcggtaaattatctggtggtgaaaaacgccgcctattcttattgaaattattgattggtcaaccaaatgttctattgttggatgagccaacgaatgatttggatattgatacattaactgttttggagaactatcttgaatcatttcctggtgccgtaattacagtttctcatgaccgttactttttagataaagttgctgaaaaattacttatttttgaaggcaacgcgcaaattgttcgcttctatggttcgataaacgaatatttacaaaagacagcaacgaaacagggcacaaagaaaactgcagcctcacaacctgacaaagggctacaaagcaaatttgtttccgaaaagccagtcaaaaagaaactaagctacatggaacaaaaagaatgggcaacgatcgaagatgagattgctctgttagaagaacgagtcgacgcactaactgaagcgatgaatcagcagggggatgactttacgaaattacagcagctccaagcagaagttacagaaacagaacaattgttagaagaaaaaatgacacgctgggaatatttaagcgagttttcagacgactaataaggaggcccattatggaacaagcatatcttgatttagggaaaaaaattttagaaacgggaaatgtcaaaggggatcgcacagggactggaaccaaaagtatttttggtcatcaaatgcgatttgacctctctcaaggatttccattattgacaaccaagcgcgtaccttttggtctgatcaaaagcgagttactctggtttcttaaaggagataccaatattcgattcttactgcaacacaagaatcacatttgggatgaatgggcttttgagcggtatattaaaagtgaggactatacaggtcctgatatgactgattttggccgtcgctcattaattgatgaagaattcaatgccagctatcaagaggaattgcaaaaattttgcgaacgtattttaaatgacgaagcatttgcagaaaaatttggtgatctaggtcatgtttacgggtatcaatggcgtcattgggaaactactaaaggggaatttattgatcagatcaaagaagtgattgaaatgatcaaaacaacgccagattctcggcgcttgattgtttccgcatggaatccagaagatgtgccgtcgatggcgctgcctccttgccataccatgtttcagttttatgttcatgaaggtcgactaagttgtcagctttatcaacgaagtgccgatgtttttttgggggtgcctttcaacattgctagctatgcgttattgactcacttgatcgctcacgagacaggactccaagtcggcgaatttatccatactttaggggatgcccatctgtatagcaatcatatggaacaaatgaaagagcagctttcccgaacaattcgttctgcacctacgttgcacttaaatcctgagaaacaatcgatttttgactttgagatgggagatatcacgattgaaggctacgatccgcatcccacgatcaaggcaccgatcgctgtctaacttattacagttgggagtgagaagatagatgacaaacgatttacagcggggaatcgtcgcaacgctgcatattacgtcaaaagataccatttcattatcagatgtagaaaaaacaattacgatccttcgttcttatttttcgcaagtcattttagcagtttctgaagtaacgaaacctgaaatcaagcggtatttatggcagctgccgccccagatctatctctttgaattgccagcagtcggtgctggtccagcacgtcggcaagctgtggcacgcgctggaaagacatttccgcaactcgcttcctttcaattatgtgattttgatcgtttgatcacttggtgtgaggaatacccagatgaactgtcagctttgagctgtcagccgtttcctacgaacactttctgtatattaggacgtacaaagaaagccttcctaagccatccaactgcttggcagcggacagaaaagctggtcaatgaaattgcagcggaagtttttcatatcaagggtcttgatattaccgccggcagtgtcttgttttctgcggaattgattcctttactagtatccgcagattcttcaagatggacggatggcgaatggccaaccaaagtgaagcatcatggagggcatattttttatcaagcgtgcgaaggcttgtgttataaagaaagaaataccgatcatctgcaagcacagcctgcttatcaattaatgagaaggctgcagattgcagcggctattgcagattcactttatctagaaagggagttttgaaacatgttgattgcactttgggcacaagacaaaaatggtttgattggagaaaacggcacattgccatggcatttgccaaacgatctgaaattcttcaaagaacaaactactggaaattcgctcattatggggcgaaaaacgtttgagggcatgaagaaaaaagcattgccaaatcgaacaacaatcgttttgaccagtgacacagcatatgaagcagaaggcgtattagttatgcatgatcgacaagaagtcttggattatactgcacagcaagatcatcctgtgtttctaactgggggttctggagttttcgaatcgatgatcgaagattgcgatcagttgtatcgaacagtgatcgacgagacatttaccggagatgtctactttcctgagatcgattggtcaaactggcatttggataaagtcatagaaggcgtagtggatgaaaagaacatctatccgcaccggtttgagttttatagtaagcagaaaaaataaataaggcagctgttacaacatatggttgtagcagctgccttatttaagtaaaagtgggttggatcatgtaaaccaaagaacggaaaaatacattagtccagctccgagcataacaaacaaatgccaaaccacatgcatgaagcgtacggatttgatactgtagaataatgcgccgacggtataagagacaccaccgcttgttaacagaaaggtaccccaaaaacccagtgaagcaatcaatggtttaaatgcaatcacgcagagccagcccataataatataaattagtgtggatatttttgaaaccgtctcttttttatgcagtgtgagtgacttataaacgatcccgctgatggctaacaaccaaatcaaaatgaaaagtgtccagcccaaccaaccttgaatactcagcaagcaaaacggcgtataactgcctgcgatcaataaaaaaatcgaggcgtgatcaaagacttggaaaactttttttgctcgtgtgaacatcaaactatggaagagcgtagagaataagaataacaaaatcatcatagagccataaatcgcataggaaatgatgtgaataggggaatctaatcgagcccctttaatcaaaagaataacgagtccagctatacttaatccaaatccgataccatgggtcaccgcattgagtacctcattcagaatcaagtagcgtcgtgtaaatttcatatgatccatcaagcaccttcccttcgaatttaaataagatgaaaaaattttttctctctgttatactgattataaatggtctatggttattttaccacgaaaagagacttgatttaaagagagagtgaatgtatgatggcaaagcttaaagttgtaacggattcctcctgtacgatggagccaaccgttcgagaccaattgaatatccatgtagttccgttatctgtaatgatcgatgggatggtttatccggatgatgattcattgcccggagaacgattcatgcaaatgatggcacaagcaaaagaacttccaaaaacgagccaaccaccgattggccattttgtggaactgttcgatgaattaggaaaagatggtagtgacgttttatcgatacatatgacaaagggtctgagtggaactgtcgaagctgccagacaagcaagtaatttgtcgaaagcaaatgtgacagtgatcgatagtgatacgacagatcaagcattgtcgttccaagtgattcgggcagctcaattagcacaagaaggtaagacattagctgaagttttgccggaagttgacaaagttcgagaaaataccaaattatttattggtgtctctacattagaaaatctggtaaaaggcggtcgaatcagtcgtgccaaagggttattatccagtttattaaatatgaaagtgattatggatttcgaccattcagaattgattccaatcgtaaaaggacgcggtgtaaaaacatttaataagtggtttgaagaattgaaagacgaattgaaacgcatgccgaatgtgaaacaaatagggatctctcatgcagaggggttagagatcacagaacaattcaaaaaagaattgcaacaactcttcccagaaatgaatattccactacttcataccaccccaatcatcgctacccataccggcaaaggcgcattcgccattacgtattacaccgaataattttaatgacagtatccaagcgattcgtaaacacgaatcgctttttgctgcgaatcacaatgattggcttgcgaagcaagacagaattgatgatgagcagtactaggcgagctgagcgagcgtagtaaccttgaaaagaatcacaaagactggcacacgaagagtgacagagcagatggtgagcaacggcgagccaaacgagcgcgatcttgaaaagaatcacaaagacttgcacacgaagagtgacagagcagatgatgagcaacggcgagccaagcgagcgcgaccttgaaaagaatcattatggttgtcactcgaaaaatgacttttacattctttttaatgtaagtttagaagcaactgcagacgaaacaatgagtacaatgagtagccaagcagttgatgaagcgggactcgaatcaagcagatgggtagaaattgcttcatacttcgctgctcttcgttgattgagtttctcgtcaatcaaaacatttcgactatgaatttaatgagaattttgataaaatagcttagattataggttaggagattgaagatccgtgaagtggaaaaaagtagcaatttatctttcagttgtattgatcgtagctttaggtactggaatgctcggtcattttttgattccaaaagcgcaaccattgctcacaccagttgcgagaacggcagaagagggaaagaccaaaaatgtgatcaattacatggccttaggcgattcgctgactgaaggagtcggtgatgagacgcaacaaggaggatttgtgcccatcgttgcagccgatttgcaagatcggtatcatttagcaaatgttgtgacgacgaactatggaattgctggagagcgcagcgatcaaatcctgaaacgagtgaacaaagacaaagaattgcgcagtgacctaaagaaggctgacttgattacattgaccgtcggcgggaatgatgtattaaaagtgattcaaactaatttttttggtttgagtgtcgattcttttaccaaacccatggccgactatcaagaacgattagtagagatgtttgagcagattcgtcaactgaatgaaacagcacccatttatgtgttagggatatataatcctttttatttaaattttccagaaattactgatatgcaaacgattattgataattggaacaaagcaacagaaacatttgtcaaacaacagcaaaatgcttattttatcccaatcaatgacttgctataccaaggactaagtgacgaagttgggatcgcagatacggattcttctgaagcaggcgcttcaggatcagcagaaacttcggataccacaacttccaccaccaacggtatgaccggtacttcagaaactgggggaacaaaagtgaccaacaatgtactgtatgatggggatcgtttccatccaaacaatctagggtatcagctaatggcgaatgctgttcgtgatgaattaatcaaaacccaaaatgtttggctgatgaaggaggaaaaataatgaaacaagaaactaatgatgtggataaaaaaagtccaatcaaaaaaatgaattactggaaaattgcttttctagttttagtaggcattctgttgggaacaactgtcttttttgcttcacgggtgtttcaacaacgtgaatctgggatctcagaaagtgcagaactagtcaaacgagacggtaatcctgttttgaccatcaacagtaataagagtcaagtcaatcaattgatcgatttctatttaactgattttcagaaagatcaagaagtaaaatacaatttcgagttgagaaatgaggcactactgacaggtcaatttaaagtgctgaactttccaatcacattttacttatactttgatccttatgtcaccgaagaaggcaatgttcagttaaaagccaaaagtttatcaattggtactttagatctgccgaccagtgaagtgttaaaaatgatcaagcgcagcttcaagtttccagagtggatcgaggtcaatgcggatgaacaaattattttgattcgcttggatcaattccgcatgcaaaacggcttgtttatcaaagcgaataaaatcaatctagtagatgatgagatccaaatgagtctctatctgccagcagaaacggaggacaaataatggaacgagcaatttttgcgggagggtgtttctggtgtatgattcagccttttgatgagttagaaggagtacagtccatcttttccgggtatacggctggacacacggttgacccgacctacgaggaagtaaaaagtcataaaaccggtcatacagaggctgttgagatcatttttgatccagaaaaaatcagttttgaggaattattgactatttattggcaacagacggatcccacggatgcttttgggcagtttgaagatcgaggagacaattaccgaccagtcatcttctatttcaatgaggaacaaaaacaaaaagcagaagcaagcaaagccgctttgcaagcatcgggtcgctttaatgccccaatcgtaacgagtatcgaacctgcacaacctttttatttggcagaagaagagcatcaagaatactacaaaaagcatcctgaaaattttgctcgcaatcatgcgagacgagcagcttttcttgaggatcactgggagaatacgcatgcgtaaaagtttttatacttatttaatggccatcaaagggcctagtcatactgatgaggcacagatctttgcgacacatgcaagtcatgatattcaattcccaaaacataccgacgattatgatgaagtttcttcttatttagaattgaacgtcgattatttgccttctatggatatttttgatcgtatttgggaacagtatgtggaggataataaataagagagagtggagtggaaacttcctctctttttacactagaggctaaaaaattaatggacagaaaggtgtctttctatgaaaaatgtttcttttcaccgttatgtgatctcactgatttgtgtcgcgatcctctcgggaggcggtgtctacatttggcaaaaaagtacggctgcaacacaatccccacagaatcagcccacagtggcgacatcaaatgaactggaaaaagttcaaacgctttttgaccaaattcgtgccaattattaccaagaagtagatgaggatgtcttggtcgaaggggcattaaaaggaatgaccgatgcattaggtgatccttatacaacgtatcttagtgaatcagcagccaatgaattggatcagtctttatcaagcagttttgaaggaattggcgccacccttacccttgtcaacgactatccagaagtggcacaagcccctatcaagaactccccagctgagaaaaacggtttgcgtctaaacgatcgtattttgaaagtggatgggaaagaaacgaaaggcctgtcattaacagaggtcgtaaacaacattcgtggcaaaaaagggaccacagtcaagttgacgatccaacgggaaaaagagacctttgacgtatcgattacacgagatacgattccagtggatactgttcatacagaccttgatagtgagaaaaaaatcgggaaaatcgaaattacgacttttggtgaaagtactgcctccgaattaaaagaaggaattgagtcactgagaaagaaaggagcaaaatcatttattctggatgtccggcaaaatcctggtggacttttagatcaagtacagatcatggctagcatgtttttagaagatggaaaaacgatcgttaagtttgcagatgatagtggtgtcataagtgaaacgaaggcaagtgctgctcttgatgaaggattcaaagtcacagaaccggttgtcgtcttggttgatggcggcagtgcatcggccgcagaaatttttgcagctgcgttgcaagaatccgcagatataccagttgttggtacagaaacctttggtaaaggaactgtacaaaatgtaaaagaattaggagacaatagtgagttaaagatgacggtcatgaagtggctgacgccaaatgaagaatgggtcaatgagcaaggtgtaatgccagatcatcaagcagattttcctgagtatgcctatttagctccattaccaagagacaaagaattgaaagaagggcaaagctcagaagcagttgatcggttgaatcagtttctttctgcactaggttatcggaccaccggagatacatttgaccaaaccaccgtatcagccgttcaagccgttcagcaaaaagctgagctggaagtgacagggaaagtgaatgcagaaacagcacaagcaattgagaaagctgtgacggatcaattaaaacaagaagatcatgcttatttgaaagctgtcgagttattatcaaagtagtaacaaagtaaaagaggagggacatcatgcagcgaagaaaaatctggatcgatcgcttttggttcatcattaaatacgcgattattgcattggcctctgcattcctgattcgtgcattcttgctgatccctgtaccggtgggcggaaattcaatggaaggtaccttaagacagggtgatatggttttgatcgagaaaatctcacccatcaagcgatttgatgtcgtcgtttttcaaatgccggatggttccacctatattaagcgagtgattggattgcctggtgaatccattcgttacgaaaatgatcaactatatgttaatgatcagccggtagatgagaattttctagtgaaaaatcgaaagaatgatcacgaaaatgtctcttatacgaatgactttgatctacagtcattgttgggcgttgaaaagctggggaaagacagctatttcgtgataggtgacaatcgtcgtgcctctaaagacagccgatcatttggtgccatttctggagatgcgattttaggaaatgctcgttttgtttattacccactaacccatatgcgctttatataatgaaaaacaaaaacatcatttattcatatttttgcgtaggtatcgctactttcaaaaaatatgagtagatgatgtttttaatagcagctagtatttttctgcagaaatcaatgttgttggatcctttgcttgataataaaatgctgttcttgtgtcatgttctttacataattatttaacacttactttgttgtttttcgttattctattgaaacgaacaagcaagaaataattttataagtaagcgttgacagtgccattttaagctgatatactttggctgtaagttagaaaaaggaacgagaaatagcgccgcagctgtttcttgagttatgttactgagacgatcaggcagaactcagaatatatatcaagtacactttcttttgtaaagtttatttgatatttattctgagttcttttttctggaaaggagaaacgaatgaaagttaaaaagattatcaataataatgttgccttagtggatagaggagggcatgagtcgatcatctacttaacaggagtcgcattcaagaaaaaagttggccaacatatttctgactctgaagtagaaaagacctttgtcttagatagccaagatcgattagagcattttagctacctcttatctcgcgccgatgatcaattgatcctgcttgtaaacgagctcgtacaatatggagaaaaagaaatcggcaaaagtgccaatgattatctttatttagctttgttagatcatttatcctttgcattgaaacgggcaaaaaaagatcaatatttgaggagtccattgacttgggaggtaaaaaaattctatcccagttattacaaaattgggttagaagccttggaaaggatcaatcaaacctttcaagtcgattttcctgaagatgaagccgttgccattgccttacattttgttaacttgcaggaaacgaaagcaaagtttgatgaacaattagctgatatggaaacgttgcgggatatgctgaatattatcaaatatcattttacgattactttagatgaaaacagcatgaattatatgcgtcttgtgacccatctccagtatttcatcgaacgattgcggaacaaccagacctattccgacaatgagtctcaactttataaacaagtgaaagcaatgtatccggaagcatttgccgcggttgaaaaaattgagatctatgtcaaaggaaagttcaacagttacctgacacaagaagagtacacctacttaatgatccacatcaatcgtgtaacagaaagaggagaatgacatgaatcaataccatgatttcaacgagcaaatcatcaaattagttggcggaaaagccaatattcaagctgttgtgcactgcatgactcgtcttcgttttactttaaaagatcgctcaaaagcagatacaaaaaaattgcaagagctggaaggggttattgatgtggtaagcaataatgttgcttatcaaattatcgtaggaacccatgtaaacgatgtttacaaagatttaattgaccaactgggaatgtcaggagacgaagcagaccagtcaaaaacgaagaaaaatccgatcaaggcgatgctagatgtgatttcggaatcaatgaatcccattttagaaccaatcatctgtgcaggtttattagccgcatttctttcaattatttcattaaccggtttgatttcgacagatagctcaacgtatcaaatttttgatgcattacggtcggctgttttttatttcttacctattttaatggcgatgagctgtgccaaacgattaggcgccagcccttatctagcagtggctttagcagcaaccattttatctgaaccgatcaacaatgtttcaggattgagtttatttggtattgggttaccacagatcacttattcaaatagctttatcccgattttattagcagtatggttcatgggctatgtaacaaagtttgccaaaaaagtcattcctaaaagtttgcagtactttatgtctcctttagtgatcatgctgattactttgccagccacactcctggtttttggtccattagggttttatattggggaaggcatcattggcttcttcaatatattgatggacacgataggtagctggtttgtgatgatgctctattctgcattacagccattcatcattatgttaggcgccggcaatttcattatgcctgttgtggcttcattgattgcagcgaatggatatgatccagcgtttatctcatcatgtacaatctctgacatcgctgtcggcggagcaatgcttggatacttcttgcgtgctcgcaacttgaaacaaaaacaactatttgggaccgtgactttatccgccattttaggagttaccgaaccagccatctatggtgtattcgttaaattccgtcgtccgtttattgctgtgatgatcggtggaggtttagggggactgttcgccggtttaacaggtgtcaaagcttattcaattgcttggggattatttggattacctgcctatattggcgaaggcgacttcatgaatctttggttaatggtggcagcggttgtgatcagttttattggtgcgactatcgcagcctatatgttagggattccagtagaaagtgatgaagtaccggcggttaaagagaaagaacaacctgtatcttctgaaatgattcgttctactgctttaaaaagtgtagtggaaggagaagtggttcctctcaatgaaatcaatgaccaagctttttcaactggtgctttagggaaaggaatcggtatcaaacctataagtcatgtgattcattcgccaatcgatggggaagtgctaacagtctttcctaccaaacacgcgattggtcttcgcagtgaccaaggcgttgaggtcttgatccatattggtatcgacactgtttcgttagaaggcaagtattttacgatgaatgtgaagcaaggtgatcgtgtgaggacaggacaaccaatcggtgaagtagattttgaaaaagttcgtgaagccgggtatgatccaacgactattgtggtcattacgaatacgaatgattttcttgatgtgatcccaacatccaataaccagttggtaaagtcggatgatttactaaatattgtcttgcaatagaaaccgtaataaagaagatagaaaaggtgagcagatgaagttaagaaatgattttttatggggcggcagcattgccgctcatcaatgtgaaggtgcttggcaggaagatggcaaaggcccagctattatggactatgtcacagtaggcagctatgaacagcctcgtgagatcaataaagaacttcttgctaacaaagtttatccttctcatacaggcatcgatttttatcatcgttatcaagaagatattgctttgtttgcggaaatgggattcaaggcattacggatttctatcgattggtcaagaatttatcctaaaggggacgaagcagaaccaaatcaagccggtatcgatttttatcatcgagtcgttgacacgctattaaaacatggtatcgaaccgatcattacgctctatcacttcgaaatgccgattcatctagtgacagaatatggttcatggacaaatcgcaaagtcgttgatttctatttgcgcttttgtcgcacgatgtttgaagcattcaaaggaaaagtcagatactgggccacatttaatgagatgaaccatatcgatcctcaaagtgaggctagtgatatctttacctatatcattgccggattaaagtactctgaaatcgatgctaaggcccagacattagccatgattggctacaatatgacgcttgcaagttgtgctgctgtcaaaatgggacatgaaattgatgaaaacttccaaattggctgtgtttttggtatcgagccagtctatccagcaaattgtgatcccgtcaatgttctaaatgcctataaacaaatggatcgtgacttctatcagatcgatgcaatgtgcaatggtctgtttccccaatacaaactggaagaatatgcagatcaaggcataaaaatcgtgatctctgagtcagataaaaaagtgtttgctgagggcaaaattgattttattggcatgaattactatgcgtcttctgtcgcagaatatgaaggtgcatcggaaggaaaaagtgctttatttggcggtctgcaaaatccttatttggaaagcagtaagtggggatggacgattgatccgattggcatgcggtatttgttaaattacacttatcgaaaatacggattaccaatcatgattactgaaaacggactaggtgcagtggatgaaatcgcagaagatgggcatgttcacgatgcgtatcgcattgattacttgcacagacatgtcgagcaattgttgctgtcagttgaagaggatcaggtagactgtatcggttatctaacgtgggcgccgatcgatttagtcagtgctacgacaggtgagatgaaaaaacgctatggatttatctatgtcgacaaacaagatgatggaacagggtcctatatgcgtaagaaaaaagattcctttgagtggtatcggcaagtcattaactccaacggtgagagtatcaaaagggagaatcatgagtaaaaattagttttctattcatttcatttgtattttttttcatcaaaacttgtatcgatacgcactttaataagaaatgatggcgatctagaaagaagtaaattctttctagatttttttgttttcattgttttcataaatcagtatgagcgatgggaacctcttggtttcaaaaaggtttgatcttttcgattttgttgatcttagtacttagctacgatacatagctgcatttcgttttatttctattacttatatattcaaacgaggtagccgcttgcttgagcaaatgtgaaaaaaatgttctagaaataacgataaaattttttacagtgttgtaattctgtcagacttttggcattttttcttcaaaattgataagatgatttgagtaaaagacgtaaaatgaagtataattttaactaggctgaaaattggtctttttctcaaaaaaagttggcttcctacatcctgacactcagctagctacttttagctactttttcctaattttagctactttttcctaattttagctactttcacaagccagcaagttctcttggactgacactgagtgacagaatgaattgagccgtggaccaactcccctcatggtatttttaatttagtctgccaagtgattctagtgaatgaattaacaaggaaaggctgtggaatcagccaaataatggcatataacagaatagtcagcgtagttgggcagtttttggccattctttggatatttgctggactgtaagagcaggttgaatgagcaaatcaccactacaatacgcgtctcataggtatagttgcaggtgattggcaggtagtatttccaattaaaccaattcgtgttaaaatgcgtaggatactcggcaatcaggaaattttctcgattcgtccgatacttttaagagaaagccaaaacaatgtctgaaaaagactggtatgaaaggaaattaattatgagtaccattcaatggtttccaggccacatggccaaagcaaaacgtgaagtaagcgaaaaactaaaatttgtcgacatcgtgtttgaacttgtagatgctcgtctccccgtttcttcaagaaaccccatgctggatcaaattttacaacaaaagccacgcttgatcttgatcaataaagcagacttggctgaccctcagcaaacaaaactctgggaaggctattttagaaaacaaggtttcttagccatggcgatcaatgctcaggatagtcaaggaatcaaaatgatcgttcctaaagcaaaggaagttctgcaagaaaaaattgctcgtgacaaagctcgtgggctcaaaccacgtccgataagagcaatggtcattgggattcctaatgtaggaaaatcaacattgatgaatcgcttagtcggcaaaaaaattgctcagactgggaataaaccaggtgttaccaaagggcaacaatggttgcgttttggtacagaattggaattgctggatacaccaggaattctctggcctaaatttgaagatcctgagattggcaaaaaattagctttgactggcgctatcaaagatcaactcatccatttagatgatattgctttgtttgggttagacttttttgctcgctactatgaaggaagaattgctcagcgttattcactttctgcggaagaagaacaatgtctagcaccagaactattgatgaagatcactgaaaaacgtggctacaaagacaattatgatcgcggtagtgaattagtcgtttttgatattcgacaagggaagctgggaaggtacacattagatcgttacgaggagttaggtgaaaaagatgaaagagccgattaaaactatcaaagagcgactatttgccgaggaggttgacccggcttatgtggctcaactgatggcagacgaacgctctggtgtccaaaagctgattaccaagtatcaaaatcagcagcgtaaacagcgacaaatgcaagaaaaatatgcagaaatgtctgtatttgaacaagaactctatcagaaagggcttcggtttgttgccggtttagatgaagtcggccggggaccgttagctgggcctgtagttgccgcggcagtggttttaccgaagaattgcgggatcattggcttgaatgattcgaaacaactttctgcgaaaaaaagagaagaattatttattgagatccaaaataaagcggtagcgattggcatcggtattgcagatcatgaggaaattgatcgtgtgaacatttatcaagccagtaagaatgcgatgaaacgagcgctagctgacttatcgattacaccagagcatttattggtggacgctatgacgcttgataccgatattcctcagaccagtttgatcaaaggggatgcccggtcgatctctatcgctgctgcaagtatcatggctaaggtatttcgggataatttaatgaaagattatcatggtgtttttcctcattatggatttgatcaaaatgctggttacggtacgaaaacccatttagaaggattagctgcccatgggatttgtcctatccatcgcaaaacgtttgcaccagtaaaacagtatgtaaaataattcatcaaacagcctcatttttacgaatcttattagtgagattctttagaaatgaggttgttttatgtactttcaggaatgtacgcccttcgataaaatcctccttcgcttgtcatttgtacaaggagtcggtattcaaagtcagtggcaggtggtcaaaggctgcctcgcacaagaaaattggactataacggctgaagaagttattcaaatgacagggatcacacgcaatattcttcgttttcaacagtcgtggcatcagttgacagagagtgacttagcggaaaaaatggccgaccagtcatttatcacctttttttcaaaagactacccacctgcactgagaaaaatcgctgatccaccattgatcctcttttacgaagggaatctgtcattactccaaaagccttcactggctgttgtcggtgctagacaagcgacaagctacggtcagcagatttgtagaaaaatcattccggaactagtgaaaaagaagtacttgatcattagcggccttgcccagggattagatagtttcgcccatgaagcagcgattgaaagtggtggacaaaccattgcagttataggaacgggactggatcagtgttatcctaagagttcacaacgtctttattctcagatcaagcaggaacatttgctggttagtgaatattcgcgaggaacattgccgcataaacatcattttcccatgcggaatcgactgattgcgggaatcgcacaggcagtttgtgtgattgaagccaaagaaaagagtggctctttgattactgcacagttggctttagaaaatgggaaggatgtatttgccgtgcctggagaagctttgaccgatcgatcaaaggggtgtcatcagttgattcaagatggagcaaaatgcacgctgacagcagaagatatcttagaagaattgccttaggcttttgaacttatgatgatcctttcttgacaaaactttttctgaaagctatgataagctacgatttggatgtttggaaagcaagtggattgtttgccgaatatattatagtaggaaaaaatgaaggaaggagccattttttatatggcatataaatatctagtgatcgtggagtcgccagcaaaggcgaaaaccattgaaaaatacctcgggcgcaactataaagttgttgcgagtgttggacatattcgtgatttgccgaaaagcaaaatgggcattgacgtcgaaaatgactatgaacctcattacatctcgattcgcggcaaaggcgatgtcatcaagagccttcgttctgcagctaaaaaagcagaaaaagtttatctcgcaagtgacccggatagagaaggggaagctattgcttggcatttagctttcttgctaggactagatttaaaagaaaagaaccgggtcgtttttaatgaaatcacaaaagatgcagttaaagctgcgttcaaagaacctcgtacgattgatgtcgatttagtagatgcgcagcaagctcgtcgggtgttggaccgtctggtaggttattcgattagtccaattttatggcgcaaagtcaaaaaagggttgagtgcgggccgtgttcagtcagtagcattgaaaatcatcattgatcgcgaaaaagaaatccgcgagtttatacctgaagaatactggagtatcgatggcaactttaaaaaagcaacaaaaaagttcaaggcggctttctgggggctagatggtaaaaagaaaaaactaccaaacgctgaaagcatcaaagaagtgaccgagcgtttagatggcaaagattaccaagtgaccaaggtagaaaagaaagaacgaaaacgcaatccttcggctccttttacaaccagcagtcttcaacaagaggcagcccgcaaattgaatttccgtacacgtaaaacaatgatggtagcccaacagctttatgaaggaatcccattaggcaagcaaggaacggtggggttgatcacctatatgcgtaccgattctacacggatcgcggatacagctaaaggagaagcggcggaattcatcgaaacaacctatggctcagctttttcagctcatggtggcaagaaaatcaagaatgcgcaaggggcgcaagatgcccacgaggctgtacgtcctacaagcgtcatgcgtacaccagaagaaatggaaaagtacttggacaaagatcagttgaaactctatcgcttgatttggtctcgttttgtagccagccaaatgactcctgcgattttggatacaatgaaagtgacgctacagcagaatggcgtcatattcatagctaacggatccaaaatcaaatttaaaggatttatgcaagtgtatgttgagggacgagatgacggcaaagaagacaaagagaatattttgccggaattaaacgaaggggacgttgttcagtcgatctctatcgaaccaaaacaacacttcacacaaccacctgctcgttttagcgaagcaacgttgatcaaaactttagaagaaaatggtgtagggcgtccatcgacttatgcaccaactttagaaacgatccaacggcgctattacgttaaattaactcaaaaacgttttgaaccaactgaattgggagaaatcgttaattcgttgattgaggaattcttccctcaaattgtcgatacccatttcacagccgagatggaaagcagcttagatagtattgaagcgggcaaacaagaatggatcaaagtcgtggaccaattctatcgaccatttgaaaaagaattatccaatgcggaagaaaatattgagaaaatccagataaaagatgaacccgctggcttcgattgcgatatttgtggtcatccaatggtcatcaagctaggtcgttatggaaaattttatgcttgtagcaattttccagattgtcgaaatacaaaaccgatcgtcaaagaaatcggagtggaatgtccagtttgtcaccaaggacaagttgttgaaagaaaatccaagaagaaccgaattttctttggctgcacacgctatccagaatgtgactttacgtcatgggataaaccagtaggcagaaactgtccaaaatgtgacaactatttggttgaaaagaaagtcaaaggcggcaagcaagtcgtttgtatcaaaggtgattatgaggaagatgttcaaaagtaagctatcgatcgtttttgacctctcaataaaaaaatgaagtgagcgcaagaagtatctgctgagagacagcagacttctgcgttccttttcaaaaaacagagctgtgacacaaggaatagaataaaaaataagcagagacaaacggtgatctgaagatcagcatctgccaatgtaagggttattttttgttttgatgacttttggcacagactcttttactataaaggagacgaagtatgaaaaaaatcaatgtaattggtgctggattagcaggaagcgaagctgcttggcaagctgctgaggcaggagtggctgtcaatttgtatgaaatgcgtcctaagaaaacgacagaagcccatcatacgaataattttgcggaacttgtttgtacaaattctcttagaggaaacaatttaaccaatgcagtaggtgttttgaaagaagaaatgcgccgcttgaattcggttattatctcttcggccgatcagacagcggttccggctggtggtgcactagccgttgatcgggacgatttttctgaattagttacaaagcgggtgaaagaacatccgttggtaacagtgatcgaagaagagatcaccgaaatcccagaaggaattacggtaatcgctactggaccattgacttcagaaccgttatccaaggcgattcaagcattcaatgggtcggaaggcttctatttctatgatgccgcagcgccaatcattgataaatcaactattgatatggataaagtttacttgaaatcacgatacgacaaaggagaagcagcatacctgaattgtccgatgaacgaagaagaattttatgcctttcgtgaagccttggtaaatgccgaagtcgctcctttgaaagagtttgaaaaagagaaattctttgaaggctgtatgccaattgaagtgatggcctctcgtggtccaaagacgatgttgtttggaccaatgaaacctgttggtttggaagatcctaagacaggcaaacggccttatgcagtgatccaattgcgtcaagataacgctgctgcctcgttgtacaacattgtaggtttccaaacgcatctaaaatggggagaacaaaaacgggtctttcggatgatccctggattagagcaagctgaatttgtccgctatggtgtaatgcatcggaatagtttcatgaactcgccagaacttctgcaacaaacctatcaatctcgcaaacgtgatgacttgttttttgctggtcaaatgacaggagtagaagggtatgttgaaagtgcggctagcggtctagtagctggaatcaatgcagcaaaacttgcaaaaggggaagaaccaatcatctttccgcaggaaacaacaatcggcagcatggcgtattacattacgcatgcagaaggcaaacatttccaaccaatgaatgccaattttggcttgcttcctgaactgcccgaacgaatcaaagataaaaaatcccgttatgaggcattggctaatcgtgcgcttacagctttagaggctgccaaagaaacagttgcaaattaattgtcgaaaactttctcacgagaaattgttgagaaagtttttttttgaattgtcttgaaacttggtagcggttatcatatgattaacagtaacaatagcgaaggtggtgacgatcgtgattggggaatgggtcacattgcttcaagagtatctgcagcagtttccatcttatattcaaatagtgggctggctgattgtactatttgttttgatatttgccgtttttctgcttttcagtttgttgctaggcccgtttatgtggcttttcaatcgcttgacagataaaaatcgtagcaatgttcttggtcatgaagattttttgattggtgaattgacagaaaagatcgtcggaaataccctcggtgaagtgatggagattggcagtaagacagcgcgttctgtttatccggcaaagttctataaagaagaggatattcgagaaaagcgagaattaccagtcggaaccaaagtgattattgttgattttgacaaaaaaggtattgctttagtggtagaaaaccacaattttattgaatagggagtgttggaaaatgttagatacagggaatgcattagattttttaagtaatccaattttatggatcatcgttttagtcgtgttattgatcgcatttttaatgattcgttaccgaatcggcaagccagatgaagcgttgatcgtaacggggtcatttttaggtaaagaaggcatcaagattttaaaaaatagcggaacattcgtgatcccaattgttcaaaaagcacataaattgagtttactgacgcataaacttgaaattggcacaccagaagtttataccgaacaaggggtaccgatcaaagcaagtgcgacggttttagttaaagttggtaacagtacggaatcgatcaaaacagctgcagaacaatacttaggcaaatcaaccggcgagttggaagatgaagcacaagaagtactggaaggccacttgcgggcgattctagggacaatgaccgttgaagcaatttacaaaaatcgagatgattttgcggaacaagtgcaagaagtcgcatctaccgacttgaaaaaaatgggattagagatcgtttcatttacaatcaaagatgttagtgacagtaacggctacttagatgccttaggacgaccgcagattgctgaagtgaagaagaatgcagaagttgcagaatcaaatgcattaagagaaacacgaatcaagcaagccgaaaatgaacagttggcacagcacgaggaaattcgtcgccaaacggaaatcgcagaagcaacgaaagatatggcattgaaacaagcacaatacaaacaagaacgggaagtagcagatgctaaagcagaacagattgctgtgggcgaaaaaatgaaagtccaattgatcgaacaagaaaagaacatcgagatccaagaaaagcaagctgaactgacggaaaaagaattgaatgctacagtccgtaaaaaagcagaagccgataaatatgttgtagaacaaaatgccttggcagataaagcaagagaaattgctcgtgcccaagcagaggctgaaaaagtgaaactagctgcccaagcagaagcagagagaatcgaaaaactcggttcggcagatgctgaaagaatcgctaaagtcggtcaagcagaagccgaaagtcgcgaaaaaatggcgattgctttaactaaactgaatgaagcaggtattttgatggaattcatcaaagtattacctgaaattgccaaagaagttaatgcgccacttagcaacatcgataaagtggtcagctttggaggcaacgacggactccacgacatgggagaagccggcttggcacggacatttgatactatcaaagaaacaactggcctcgatttagtcaatctcattaatcaaaccatgtctactaaacaaggaaacaaagagttagtagcagccatcgaaagccaaaagccagtagaaaatcaatcaaacacagacaatgacacccaaccaatcgaataacccaaacaacgcactcaaacgagtgcgtttttgctgcgaatcacaacgagtggcttgcgaagcaaggcagagttgatgatgagcagcggggagcaaagcgagggtagcaaccttgaaagaattttctacggctgactctggaaagagtggaacgcaagttctacttagttcacagtgagaagctactggaggcaaagcatatgcccagttgaatttggggcaagtccttcgcaagttttcgtgtaaatcataacaatcaaaaaaagcttcgagaaacctgcggatcttttctaaattctcccttatagaattttcataattatgtctaaactttgaaatattggttaaattctgacaattcgtttgttttttttaaaactctatgatacagttatttcgagtcatgaaatgggggattagtttgccggagaacgaacttcaaaatgatttttttcgttatctaattgttgaacgaggctattctgataataccaagtctgcttaccaagaagacatggaggatttctttcgttttttaaaagagtctggcaatgaagactttcttgccattgatcaccgtgacgtcagagtataccttagttttttgaatgagcgcaattacagtcgcaattcgatcagccgtaaaatggccagtttgcggtcgttctatcactttttaacgaaacacgaagtcattaaagaaaatccattcgcttatattcacttaaagaaaaagaacgcaaaattaccgcgttttttttatgaaaaagaaatggaggcactttttgaaagtgtaaaagggcacgaacctttgcagcaacgaaatcgagctttgttggagatcctgtatggatccggactgcgggtcagcgaatgcagcaacctaaccttgtcagacgttgattgggagaatggtgtattgttgatccatgggaaaggaaacaaggatcgttatgttccttttggcagctatgcgcaagaagcgttgcgagactatgtctcagctggacgccaacagttgatggagaaacaccacaaacggcatgagattgttttcgtcaatcatttaggtgacggaatcacagcgacggggattgagtatgtgttgaatcaaatcattcgcaaaagtagtttggacagcaagatccacccccacatgttgaggcacacatttgccactcacttattaaatcacggggctgatatgcggaccgttcaagaattgttaggccatgccaacttatctacgacgcagatctatgcccatgtcacaaaagatagcttgcaaaaaaattaccgccaatttcatccaagagcttaaaaattggcgacaggaggaaagaattatgaaatcaccttttcattcaacaacgatttgtgctgttgaaaaagatggcaaattcgcaatggccggagatggtcaagtaacaatgggagaacaagtcgtcatgaaagggacggcacgcaaagtacgccgaatctataacggtgaagtcgtagttggatttgctggaagtgtggcagatgctttcacactggaagaaaaatttgaaggaaaactcaatgaatacaacggcaacttacaacgtgctgctgttgagttagcgcaagaatggcggacacagcaatcgatgcagaaactagaagcaatgctgatcgtgatgaatcaggaagaaatgctcttggtttctgggacaggagaagtcatttcacccgatgaagggattttggctatcggttctggcggcaattatgcactcgctgcagccagagcgatgaaacgttacggcggtgatctttctgcaaaagaaattgctgaaggagcattgaatatcgccgctgatatttgtgtctttaccaatcacaacattattgttgaagagttttaaagagggatgaagctatgacaaatcaaaatatatcaccaaaagaaatcgtcaaagaattagatcaatacattgttggccaaactagtgccaagaaatctgttgcagtagctttacgtaatcgctaccgtcgtctccagttggatgagaaaatgcagcaagatgtgacgccgaagaatattttaatgatcggaccgactggtgtcggaaaaacagaaattgctcgccgattagcgaagatcgttgatgcgcctttcgttaaattagaagcaactaagttcaccgaagtcggttatgtcggacgtgacgtggaatcaatgattcgggatcttgtggaaaatgccatccagatcgtaaaaaaagagcaatacaaaaacgttcggctgcaggcagaaaagaaagccaatcgtcgactggttaaagtactggtacctggaatcaaaaaagagcaaaagaaatctgcgaatccatatgaacaaatgatgaatatgttcaatcctggtcagcaggcagaagaaccaaaagaagaactgacggacgaaatccgcagcaaccgtcaagccatttatgagcaattagaaaaaggcttattggacaatcgtgaagtaacgatccaggtggatgaaccaaaaacacagtcaccaatgatgaacaatggattggaacaaatggggatcgatttgaatgaaacattaggtgcattgaaaccgcaaaagaaaatcgaacggacagtaacggtaaaagaagctcgagaattattgatccaagaggaatcttcaaaattagtgaatgatgcggatatccatagtgcggcattgcgtttagccgaatctagcgggatcatcttccttgatgaaatcgataagatcacatcaaaatcgcaacaatcaggcgaagtttctcgtgaaggtgtgcaacgggatattttaccgatcgtagaaggatcacaagtcaacacgaaatacggccctttacaaaccgaccatatcctattcattgcttcaggtgcctttcatttgtcaaaaccaagtgatttgatccctgaattacaaggacgcttcccgattcgtgtagaacttgatgatttaacgaaagaagactttgtcaagatcctgacggagccaaacaatgctttgatcaagcagtatattgccttgttgggaacagagaatgtgacagtcacttttacgctggaagcaatccaaaaaattgcggaaattgcctttcaagtgaatcgcgatacagataacattggcgcccgtcgcttacacacaattctagaaaagttacttgaagacttattgtttgaagcatccgacatgcaaatgggagaaatcactattacagaagcgtacgttgaagacaaacttgcttctattgccaaagatgaagacctaagccggtatattttataaagggagagaaccaatgaaaacacttttagaaaagacacgtcaaatcaatgaattactgcaacaaaaaaataccttcaatctggcatctgatttgccttatgataaaatggcggttattttaggtgacatactcgatagcaatgcttatattatcagtagtgacggtagtgtgttgggattcgttgagacgcatgatgtcaacaatgaacgtatcaaaaagatgtttgtagaaaaacagtttcctaaaaattatacaagtttagtagataatttatcttcgacagaagcaaatgttcccatcagcaacgatatgactgcttttcctattgagatgcgggagttatatccgaatggtttaacaacaatcgtgcccatttatggtgcaggcgaacggttgggcacgatcattttgtctcggatcgaaaaaacgttcgatgacgatgatctagtcttagcagaatacagtgcaactgtagttggcatgcagtttctttatcaaaaatcccgcaatatcgaagaagacgttcgtagtgcgactgccgtacaaatggcgatcaatacactgtcatacagcgaattgaaagctgtccaagcgatttttgaagcattagaaggggatgaaggacgtttgaccgcttctagtattgcggatcgaatcggtattacacgttctgttattgtaaatgcattgcgcaaactggaatcagcaggtattattgagtcacgttccttgggaatgaaaggaacttatttaaaagtgttgaatagtcgtttcaaagaggaattgaacaaacatcaatattaggagatggcgatatgacagttacgatcagcgcagggcatttgcaggcaacaattgccgaaaaaggagccgaactgcaaagtttgattgatgtgaataccaacttagaatatatttggcaagctgatcctgcacattggggaaagcatgcaccaatcttatttccgatagtgggtgcgttgaaggacaatcaataccgctacaaaggtgaaacgtatcatctgccacggcatggttttgctcgagacatgatgtttgaagtcgtggagcacaaagtagattatgttcgtttactactagctagcagtgaggagacaaagagcaactatccctttgattttcagttgtttgttagttacgaattaggtggagacggtcttgtagtcaagtatcaagtcgtaaatgatagtcaggaagacatgttcttctctatcggtggtcatcctgcattcaatgtaccgttaggagaggataatgtatttgaagatttttatctcacattctcacctaagaaatctcgtgtaaaattgccgttggtaggcaattatatcgatctggagcagcggacattgggacaaacgaacactgatctacggttgactcatgagatgtttaagaacgatgccttgatttatgaaacgaaagggttgaattcattttcgatccgcagtgaaaaatctcctcacagtgtgacattgagctataataatatgccttacgttggcttttggacgacttatccagtagaatctccttttttatgtattgagccatgggtaggtattgcagataccttagagactagtggcgaactacatgaaaaaacaggaatccaatgcttggcagccaacgagcaatttgaaacgaaatattcgatcacagttaagtaagcctatgtgaataagaaaaaaagaagctgggacgaaagtcatgaatgacttttcccagcttctcctattcttttttattaagaccaaaagagatacggctctctgtgccgtctttgatccgcttgatattttcacgatgacggataaaaataaaacaggtgacaccaattgcgatacacgtcaataaccaattttgttttggtaaaatcattggtgcgacataaggcaataggattgtcgacaaagtgatcaagcaggctgcaatcatacttgtcaggctgaccatgctggttatgaacaaacaaatcacaaaaataagcgctgaataaatgaagaaaattggattgtagcctaaaagcatgcctgcgctggtcgccaccgctttccctcctttgaacttggcaaaaattggaaacgtgtgacctagaatagcacaaacaccaaaccaaagaggattgattgttgtgactgaaaagatcgccggcaaacaagtagccaaggtacctttcagaatatccatcaataaaacaatgacgccagctgatttgccaagaacacgaaaggtattcgtagttcctgtattcccgctgccaaattggcgaatgtcttttttgaagaatagctgaccgatccagacaccagagggaatcgaaccgagcaaataagcaataaatagtaacagaatcgtcttcatgataacccactttccttgaaagtctagagcaattttagcatgaaaccgtcgcagcaacaataagaaaatactgaagctatggataaacgagcaatgatagatggatcatccaaaagctaaaagtgactttgccttgtcgaacggtaggaaaaaggataagatagtttagaaaaatgttcgcttgaaaaaagccgattttatgttaagattttttttgcgaatcattcatgttgggtttccgcggaaacccacttaatttagttaaaggagcggtggctttggcaaagaaaaccacagagtataatgatgcctcgatacaagtcctagaaggcttggaggcagtgagaaagcgacctggtatgtatatcggatcgactgacggccgaggcttgcaccatttggtctacgaaatcgttgataatgcggtcgacgaagcactatcaggattcgggaatgaaattgatgtcactatccacaaagacaatagtatcagtgtgcgagacaatggtcgtggaatgccggtgggaatgcatgcttcaggaatcccaacagtcgaagtcatctttactgtactgcatgctggcggcaaatttggccaagggggctataagacatcaggtggactccacggagtgggtgccagtgtcgtaaatgcgctatcaagctggctagaagtttctatcgtacgagatggtatcgaataccaagagaaattcaaagatggtggcaaacctgacggtacattgaaaaaaatcggaaagacgcggaaagcaactggaacaaccgtacgtttcaagccggatgacacgatttttacaacaacgaaattttcttatgacacgttagcagaacgattgcgagaatcagctttcttattaagaggagtgaaaatcaccctaacagatgagcgggctgaattgcagcaagaggtctttttatttgaagaaggaatcaaagagtttgttgattatttaaacgaagaaaaagatacattaacgcctgttgtgtatttttctggcacaaaagaagcaatcgaagtggaagttgctttccaatataatgatgggtattccgaaaatgtcctatcatttgtaaataacgtgcgtacgaaagacggcggtacccatgaagtgggaatgaagatctctatgactaaagctttcaatgaatatgctcgaaaggtcggcctgctgaaagaaaaggacaaaaatctggaaggcagtgattttcgggaaggtttagcggcagttctgtcgattcgggtaccagagaatctgcttcaatttgaaggtcaaacaaaagaaaaactaggaacgccgatcgcacgaaatgcggtagacaatgtgattggtgaacaactgggttattacttgcaagaaaatagcgagatgagccaaatgcttgtccgtaaagccatcaaggctcgggaagcgcgggaagctgctcggaaagcacgagaagaaagccgcagtgggaaaaaacgcaaaaagggcgaatcgttgttatctggaaaattgacaccagcccagtctcgtaatccgaaaaaaaatgagttgtacttagtcgaaggagactcggctggtggatcagccaaacaaggccgagaccgtaagtttcaagcaattcttccgttacgtggaaaagtcatcaataccgagaaagccaaaatgcaagacattttgaaaaatgaagaaatcaatactatgatctacacgatcggcgcaggtgttggtccagaattttcgatcgaagactgcaattatgacaaagtgatcatcatgaccgatgcagatacagatggtgctcatatccaagtcttgttgctgaccttcttttatcgctatatgaaaccattgatcgaagctggcaaagtttatattgcattgccgcctttgtacaaagtttcaaaaggcctaggcaaaaaagccgtagttgaatatgcctggacagatgacgaattaaacgcggtgaccaaaaaaattggtaaaggctatatgctgcaacggtacaaagggttaggtgagatgaatgcagatcaactttgggagacaacgatggacccagaaacaagaacattgatccgtgttcgaatcgatgatgcggcacaagcggaacgacgggttactacattgatgggtgataaagtagaaccgcggcggaagtggatcgaaagccatgtccaattcagcttggaagaagacggcagtattttagagaaaaaagaagagacgatccctggattggtcgaagaaaaattacaagaagctgagcaaatttcagcaatcagcttgtctgaggattaggaggggatctcttggaacataaaaacaatatacaagaattaacattagaagaagtgatgggggaccgtttcggcagatactctaaatatattatccaagaacgggcattaccggatattcgagatggcctaaagcccgttcagcgacgaattttgtttgccatgaatcaagatggaaatacttatgacaaaggatttcgtaagtccgcaaaatctgtagggaatatcatggggaattttcatccccatggagattccagtatttatgaagccatggtccgtatgagtcaagactggaaattaagacaaatcctgatcgaaatgcacgggaataacgggagtatggatggtgatccgccagcagctatgcgttatacagaagcccgtttgtctgaattaagcggagaattattgaaggatattgaaaaagataccgttgagttagtttggaattttgacgataccgaaaaggaaccaactgttttgccagcaaaatatcccaatctgctggtcaacgggtcgacagggatctctgccggttatgcaactgaaattcccacacacaatttaagtgaagtcattgacggaacgatttatttgattgatcacccgaacgcctcattggataaattgatggaattcattccaggtccagatttcccaactggcggcatcttacaaggaaaagaagaaatcaagaaggcatatgaaacaggtcgtgggaaagtgatcttacgttcaaagactagaatcgaagatatcaaaggcggcaaacagcaaattgtcatcaatgagattccttacgaagtcaataaagcgaatctggtcaaaaaaatggatgagattcgtttaaacaaaaaaatcgatgggattgccgaggtccgggacgaaacggaccgtaccggtttgcaaattgtggttgagctgaaaaaagatgccaatgctcaaggaattttgaactatctatttaaaaatacggaactgcaaatcaactacaatttcaacatggtagccatcgatgaaatgcggccgcagcaagtcgggttgaaacatatcttagaaagttatgtgaaacaccgtcgggaagtcattgctaagcggagccgctatgagctgaagaaagcgcagaaacgtcagcacatcgttgatgggttgatgaaggctctttcgatcctcgatgaagtgatcgcgacaatccgcagcagtaaagacaaaaaagatgcaaaaaataatctggtcgttcagcatgggtttacagaagaacaggcagaagccattgtaacattgcaattgtatcgcttgactaatacagatatcacgcaattacaggcagaagcccaagaattagctgaaacgattcgcgaattgacgaaaattttgaatgaagaaacggaattattaaaagtcatcaaaaaagagctaagagaaatcaagaagaaataccactctgatcggatgaccgagattgaagcagagatccaagaaatcaaaatcgagacccaagtacttgtcgcccaagaagatgttgtggtaactgttacgacagatggctatgtcaaacgcagcagcttgcggtcttatggcgcttctaagccagaagagttaggcatgaaagaaggcgatgcactgctttatagcgggcaagcaagcacattggatcatttgttgctggtgaccaataaagggaacgtcatttatcgccccattcatgagttgccggatctcaaatggaaagatctaggggaacatatttcgcaaacggtaatgaatctagcgaccgaagaaaccattttagctgtattcacctatcaagaacttgatccgcaaaagaatttcgtgctgattagcaaaaacggtatgattaaacaaacaagaatgacagaatttgaaccttggcgtacgtacaagagtcggccattgactatgatgaaactaaaagatgaggccgatgaacttgtcaacgtgtatttagcggatcaaaatgagccgttggatgtctttctagttagttatcgtgcttttggcctacgctatccattagccgaagtgcctgttgtaggaccaaaagctgctggagtcaaagcgatgaatcttaaagaagatgatcagatcgtcaatggattattggtttactcggaaggagatacgcctgtaatcatggtcactcagcgaggggcggtcaaacgaatgctggctcaagaaatcagtcagttaggacgagcgaaacgaggactgatggttctcagagagttaaagaaaaatcctcatcggattgtttatatgggaagcggtgaaaaccaatccctgattttgactactcaaaaggggcaaatgatcgagatcgagacgaatcaaatcccaatcaatgaccggacatcgaatgggtcctttgttaccgatgaaaaatccggcggcttgatccatgaagttgctcgagtgattgatcctgcgattcaagaagattctgtactataagttaaatgtaaaacacgcatctgtaccaatacagacgcgtgtttttttctatataattaatttttcacattttcaaaaaatggactttaataaaaaattcacatttaaaaaacgttgatttaaaagctgtttcgttgcgttttatgttttaatagctaattttgttaaaaataattcttgtaaatgcttgcaatgcaaacgctttgtgttatactattcacgtaaagctgttacacttagtgaacagaaaatttaaggaggtccatcaaatggaacaatggaatggatttaaaggaaaaacttggaaagaagaagttaacgtacgcgacttcatccaagaaaactacacaccttatgacggaacagacgaatttttagctggcccaactgaagcaactacaaagctttgggatcaagttatggacttgaacaagcaagaacgtgacgctggcggcgttttagacatggatactaaaatcgtttcaacgattacttctcacggcccgggctatttgaacaaagagttagaaacagttgtcgggttccaaacagacaaacctttcaaacgcagcttgcaaccgttcggcggtatccgaatgtcagaacaatcagcagaatcttatgggtatgaaattgattctgaagtttctcacatcttccgtgactaccgtaaaacacacaaccaaggtgtatttgatgcgtacactcctgaaatcagagctgcacgccgttctggtgttatcactggacttcctgatgcttatggtcgtggtcgtatcatcggtgactaccgtcgcgtagcattgtatggtgtggattacttgatcaaagaaaaacaacaagacttgttgtattgcggcaatggcacgatgtcagacgatatcattcgccaacgtgaagaattaagtgaacaaattcgcgcattaagcgaattgaaagaacttggtacaatctacgggtttgatatttctcaacctgcacaaactgcaagagaagcattccaatggttatatttaggctatctagcagccatcaaagaacaaaacggagcagcaatgtctctaggacgtacgtcaactttcttggatatctatgtagaacgcgaccttaaaaatggcgtgatcacagaagaagaagcacaagaaatcgttgaccatttcgtaatgaaacttcgtctagtgaaatttgctcgtacacctgaatacaatgcattattctctggtgacccaacatgggttacagaatcaatcgccgggatgggtgaagacggacgccacatggtaactaaaaacagcttccgtttcttgcacacactagcaaacttgggaccagctccagaaccaaacttgactgttttgtggtcaacacgcttgccacacaacttcaaaacattctgtgcgaaaatgtctatccaaacatcagcgatccaatatgaaaacgatgatgtaatgcgtggacattggggcgatgactatggaatcgcatgttgtgtatctgctatgcgcattggtaaacaaatgcaattcttcggtgctcgtgcgaacttggcgaaaacgttgttgtatgcaatcaatggcggggtcgacgaaaaatcaaaagcgcaagtgggacctaaattccaaccaatcacttcagaatatcttgattacaatgaagtaatggaaaaatatgacacaatgatggactggatttgtgatttgtatgtcaatacattgaacattatccactacatgcatgataaatattcttatgaacgaattgaaatggccttacaagatacagatatcttgcgtacgatggctactggtatcgcaggattctctgtagcagttgactcattatctgctatcaaatatgcgaaagtccgcacaattcgtgacgaaaacggcatcgttgaagattacgaaatcgaaggcgactatcctaaatatggaaacaacgatgatcgcgtagacgatattgctgttaacctattgaaaactttcatgaagaaagtaaaacgcacaaaaacttaccgtaactcaaaacatacaacatcgatcttaacgatcacttcaaacgtcgtttatggtaagaaaacagggaacactcctgacggacgccgcgctggtgcgccatttgccccaggtgcgaacccaatgcacggccgcgatacacacggtgcgttggctagtctttcatctgttgcgaaattgccatatgactattcattagatggtatttcaaatacattctcaatcgtacctaaagcattaggacgtgacgacgaaacacagcaagaaaacctagcaactatgttggatggttatgcagcaaaaggtggtcaccacttgaatatcaacgtattcaaccgcgacacattgcttgatgcacaagcgcatccagaaaaatacccacaattaacaattcgtgtatcaggttatgcagttaacttcatcaagttgacaaaagaacaacaagatgacgttatcgctcgtaccatgcacgaagcaatgtaatagcacaaaaaaaggcggcggatggaacattccgccgctattgttatgaatcactgcgactgcgaagcagagcagatgatgaataatactaggggaacgaagagaccgtagtaatcaaagtccgaagggaatcactgcgactgtgaagcagagcagatgatgaataatactaggggaacgaagagaccgtagtaaccaaagtccgaagggaatcactgcgactgcgaagcagagcagatgatgaataatactaggggaacgaagagaccgtagtaatcaaagtccgaagggaatcactgcgactgcgaagcagagcagatgatgaatacggggaacgaagagaccgtagtaaccaaagtccgaagggaatcactgcgactgtgaagcagagcagatgatgaataatactaggggaacgaagagaccgtagtaaccgaagtccgaagggaatcactgcgactgtgaagcagagcagatgatgacaagcgtagtttgttcatcaaactattgcctcactgcgagtattggcgaggaatcaatggaataaaacgatgcaactttatttttagtttcttcaagaaaggaagagcaacatgtcagtaacaggacatattcattcaacagaaagtttcggatcagtggacggaccaggtattcgctttattgtctttatgcaaggatgccggatgcgttgtgagttttgtcataatccagatacttggaaaatcggtgccggtatcgaacggacgacagatgacgtactggaagaagcactcaaatatcgagaattttggggagaaaaaggtgggctgactgttagtggcggagaaccattgcttcagttggacttcttgatcgatcttttccgaaaagccaaagctgcaggggtgaacaccaccttagatacgtgcggaaaaccttttactcgggaagaacctttttttagcaaatttcaagagttgatgactgtcactgatttactattatttgatatcaagcatattgataatgatgctcataagaagctgaccacacaatccaacgacaacatcttagaaatggcaaaatacctttcagaaatcaataagccagtctggatccgtcacgtgctggtgccattcagaagtgattatgatgagtttttgatccgtttagatgcgtttatcaagacgttgaataatgtagataaagtagagattttaccttatcacacaatgggtaaatataaatgggatgaattagggctgaagtatccactggaaggaattgagccgccaacacaagatcgcgtgaaaaatgcaaaagagttgcttcatgtcgatgactataaaggttatcttacccgttaacaagcgtagagaagataactattgattctttcctattttttgctatcattagaaagtggaaaatgaatgaattaggagcgatcattatgtcgaaaatattagtatttggacaccaaaatcctgatacagatgctattggagcagcaattgcttttgcgcacttgcaaaaggaattaggaaaagataccgaagcagttgctcttggaacaccaaacgaagaaacgcaatttgctttgtctcattttgaacttgaagccccgcgtgtgattgagcagattgaggctggttcagaagtgatgcttgtggatcataatgagtttcagcaaagtgcagaagggatagcagaagctgccattttagctgtagttgaccatcatcgtatcgccaattttgaaactgcaaaccctctctactaccgtgcagaaccggttggctgtacgagtacgatcgtgttgaaattataccgtgaggcaaatgtagagattccagcagctattgccggaatcatgttgtcagcgatcgtttcagatacattgttgttcaagtcacctacatgtactgaggaagatatcgccgctgcaaaagagttagcagcaattgctaatgtggatctagaggcgtatggcctggatatgctgaaagctggaacaaatttaacaactaaaacagctgctgaattgttggatctagatgcaaaaagttttccgatgggtggaaaaagcattcgtatcggtcaagtaaatacagtggatttgaatgaagtgtttagccgccaagaagagctagaaacagcaatgaaggccgaaaatcaggcaaaaggttatgacttgtacctactagtcgttactgatattttgaacagcaattctgaattgctagtgattggagagccaactgcaccggttgaagcggcgtttaacgttgtcttgacagcaaatcgcgcattcttaccgggggttgtttctcgtaaaaaacaagttgtgccgcaattaactgaaagctttaataactaatagctgacaggataatacgggcaaaaaagatgaacatttgaattggtcggacaatcagcaactgcagtcctttcactgtaataatgaaaggtttttggctagcaggggagcttaagattgtccggctatttttgaatgagagacggccctcctagtgggaatggaaagagagcgaaagacatggaatttttttatagtagtcattatcaagggattcagaaaattattgattcagagttgttctcaaaactgattcttttcttgaaaaaacaacaaaaaccaccaatcttaagagaattaaaacaaaattttccagagaaaaattttgaaaaaatacttgatcagttgatcgatgctgggatcattacccgaaaggatcgtcgctatcaagtggcatttcctatctattccacaaaagatcagcagaagagtcgtgagcgttggcaacaacctaatacgataattttagaagagttggcgttcattttacaagcggacatcatgagtgatcagcgctttttctatgcttgtgaagaaggtgtggtacaagcattcatttatcggctaatccatgagtcttttcagcttatttctttttccaaagaaaaatggccagcaacgattcccgctttttttgcagcaaatcgacaacaactgtcattgccaatttatcaggagctgttgcatttgctaggggatgttgatgaggcctattacttagatcaaatcagtgtcatctttgaacgggtggcaaaacagcgaaaaatccggccaagtatttttctcacatcactcatagaaggaaatattcttcagtcagaacagcgttttgatcttcctattgttgaggctgcatttctcactgagcagaatgggtcattgatgaaaggattgtccgaatttgatcggcgtacattattagcagattatcttggaaaaacatctaatccacaaacaattctcattacggaaatgataaaattttaataaatgtttagaaatagaaaagataaaaaagaaagaattcgttaaaaccctctttgggataacgttttctttctttttttgcattttttattatttgaaaatgattagaaaataacgagcgtattaattgattgttctcatttgaggtggtatgataactttagaattttgaaagagggcgtaaaaattggaaggaatcaaagcatttcatacagaagtgattgaagaaacaagaagcaaagcagagatgatcacttttgtttcgatggcggaaattgagcatgcacgaaaagaactttgcgaagccggtattcaagaaagccgcttttctgatggagaattaatttttgcacttaaacaaaaaaatgaatgtcatgcaaatacaatcgtaccaatcgtgatcgactggttgttaatgaaaaactatttattgactccggcccaagctgttcgttttttgacgaataaattaggacagacagaatcagtatctttgaaagcattaggagatcttgagtttgacggggatggaaaatactttttgattgcctgtcgatcaatgaataagcaatataaaaaagtgtataaagtatatacagatggacaagtgaaagaactttggcgggcatgatcctttttaggatcgagagaaaggtcatgcctgtctctgaatggattaatcaaaggttgtgagtctcaggtgaaatcaaatcaaagaatcgtctttgcaagtagccatgtgtttatttttattcttagtatggtgtcggcacttttatttattttaaaagttcctaacacatttaatgcaaatcaaattttttcagagaatatacatttttcagacacagtctttgatgtggtcacaaggctttttttattgggcatctgtagtttatatacaacagttgccagcttctggtcttttcgttcttggccttatctttcagccggaattgggatcgctgcggtcataacggctttccagatgaaagttcaattccatccatttttgtttgctttatttttgatcgtcggtttgtttcaagtaagtgtcgcttcttatgtcgcttttgtttccaaaaaaagaagcagcactgaaacaggttgaaccaatcgtgttcaagctgttttttttctgccttaaatcttttgattataagcagaggatcgaaatacaacgaatcaggaataggaattgttctattccggcaatcgccaaggcttttacgttacgagatctttaatttatgctattctacatataggagcagcaatgctaaattaaagccatctgccctgaactattttcccagtgatcttcctaatattctgtttttagatggaaggttgattggctgaaaaaatagggttgatttaagaggaggtttgacatacgagtggaaaatgagcaaatgattacagcagagaagcagtttacgaccggtgaaaatttttattcacagcatcttttaggtgcacatcgtatgaaagcaggctatgtttttcgtgtctgggcgccaaatgcgcaaaatgtctggctagtaggtgacttcaatcaatgggatgactctttgccgatgacgaaacgctccgaatcggggatttgggaaattaccaccaatcagcctcaagaaggacagcattataaattcaaggtcaagcaagccgacggccgtgaaatcatgaaaattgatccatatgcaatttatttcgaagaacgtcctggaacggctgctgtcttgtacaccgtgccggcaaaaaaatggcgtgatggtttgtggcaaggccgcaaaaagcgtcaaaatcaatttaaacgaccacttaatatttatgaagtccatgcaagttcttggaaacaccacgcagatggaaccccttatcgtttttctgaattaaaagatgaactcattccttacctcaaacaaatgggctacacccatattgaatttatgccattgatggaacatccattaggcacatcgtggggttatcaattgattggctattttgcgctcagcgcttattacggcacaccagaagaatttcaagattttgttgaagcctgtcacttggaaaatatcggtgtcctagttgactgggtgccgggccatttttgtgtcaatgatgattgtttggcttactatgatggaacgccgacatttgaatatcaagatgccgatcgtgcaaaaaatgttcgttggggagcaatcaattttgatttaggcaaaccacaagtacaaagtttcttgctatccagtgcccttttttggatcgaattttatcacatcgatgggattcgcgtggatgcggtttcgaacatgatctatcgagactacgaccagggtgtttggcaaccaaatcatgaggggggcaatcgaaattatgaaggttattacttcttgcagaaactaaatgcagtcgtgaaactggcgcatccagaagtgatgatgatcgctgaggaaagtacctcagaaacgaaagttacaggcctgattgaagaaggggctcttggatttgattacaaatggaatctgggctggatgaacgatgtcctgcgtttttaccaaatggatccaatcttccgtaaggatcatttgagtttgttgtcgttctcattcatgtaccgcatgaatgaaaactatatattacccctttcccatgatgaagtcgtccatggcaaacgtagcttaatgcacaaaatgtggggagatcgttacaagcaattttcacaattaagaaatttgtatacctacatgatgacccatccagggaagaaactgctgtttatgggcagtgagtggggacaatttttggaatggaaatatgatcacgggcttgaatgggtcgatttatcagatgaactaaatcagcgtatgcagcaatttacaaagacactaaatgaactgtataaacaggagcgctcattgtgggaaatcgaagataaagaagaatcgctggtagtcattgatgctgataacttagcggaaacaacattgacctatttgcgacaaggtaaaaccaaaaaagatttcgtgatcgttgtattgaatttgacacctgttgaacgccacgatttcgccattggcgttccgtatgaagggacctaccgtgaagtattgaataccgaacgcgatagttttggcgggacttggacccagaataatcaagaccaacaaacagaagcgattccattcaaagaatatccttatcaaatcaaaacaattttgccagcacttggggcattgattataaaaccagaaaagattcaaatcaaacgcaggaaaaaatgaaaggggggaggagctggctcgaaagtccaatcgaagtgacaacgtgaaaggtgatatcgaaaagaaggctttttgaaagaaaagcattcatatcgaaaataacaccggcatcgtgaaagagattggctttttagcggctcaagaaaatgaaaacagagatgttagcgatgatcctcgcaggaggacaaggcacacgtttagggaagttgaccaaaaatattgcgaaacctgcagtaccttttggtggtcggtatcgtattatcgattttacattaagtaattgtgtcaattcagggattaagaatgttggtgtggtgacacagtatcaacctttggcattgaacagtcacattggaaacggatcaagttgggggttagatggtatcaataccggagtgacgattttacaaccctactcaaattctgaaggtggaaaatggtttgaaggaacagctcatgcgatctatcaaaacattgcctacattgatgaaatggaccctcaatatgtattagtattatccggtgaccatatctacaagatggattacgaagaaatgctggaaaaacacaaagaaaacgatgcgtctcttactgttgcagtgctagaagtgccaatgaaagacgcttcccgctttggtatcatgaacacagataaaaatgaccggatcattgaatttgatgaaaaaccagcagagccaaaaagtaacttagcttcaatgggaatctatatctttgactgggctcgcttacgcagcgtactgttaagcaattatacaaaagacggcgaaatggtcgactttgggaaacacgtgattccatcttacttggaaagtggcgacaatgtatttgcttatcgtttttcaggctattggaaagacgtgggtaccattgattctctttgggaagctaatatggaatttatcgatccacagatggaactgggaatccgtgataaaaattggcaagtcttctcaaaaaatccgattgctcctcctcatttcattacagaaacaggttctgcaaaaaattcgttgatcatggatggttgctatgttgctggagatattgaacatagtattttatcagaaaatgttcaagtcaaagaaggaactaagatcacagatagtgtggtcatgcctggagcagtcattgggaaaaatgtaacactaaaacgcgcgatcattggagaaaatgcagtgatcggtgatgatgcagtcatagacggaacagatgaaattgctgttgttggttattctgaagtgataggagtgacgattgatgagaactaataaaatgtgtgccattttaggcaatctgcaccgctacaaagaactgatgcccttaacggaaagtcgtccgttgtcgacgctattgtttgattgtaaatatcgtttgcttgatttcaacttgtcaagtattgaaaatgcaaatatcaaacaagtgtatatgatttttaatgaaggagaaacacaatccgtatttgaccatatcggtggcgggaaagaatggaatctagatggtgttcaaaaccgtttcttcattcatttgttccaagactcattaaaacagcaagctgctggtcaagagtattactataacgtgatcgattatttggaaaaatctaaatcagagcatacggtttatatgggcagcaatattttgtgcaacatcgatttgcgggcgttgctgaaaatccaccagttacagaataaagaaatgacggtcgtttataaacgaatcagcagtgataacgtaagtgacaacgacttgatcttttcagttgacgaagaaggccatttgaatgaagctgtccaagcgaagaaatgcgagacagaaagtatggtcaatctttgcactgatatcttcatcatcaaaacagaccgcctgatccaagctttaaaagaaggacaagctgtaggagctactccagacctaggtcgtttcttgcgggaacgaatctctatcgaaaatactagcttgtatgaatatactggttatttaagcaatatttatgatattcaatcctattaccaaaccaacatggatatgttagatgtccacaaatttacctcattgctttactcaaatcaaaagatctacaccaagctgaagaatgaagtgccaacctattacgctgaaacttcggatgtcaaaaatagtcactttgcttctggttgtatcgtagaaggatctgtcgaacggtcacttgttgcccgcagaacaacgattcatccgaatgcccatgtcaaagacacgatcatttttgggaataatgaaatcaaggaaggtgctgaagtttcctatgctattctcgataaaaatgttgtgatcgcagaaggtgtcaaagttagaggaaccagtgacgcaccgatcgtcgtcaaaaaaaatacccatgtcactgaagatctaattggaggagcaacggcatgaaggtactatttgccgcagcagaatgcgcgccatttttcaagacaggtggactaggggatgtcgtgggtgcattgcccaaagaacttgtcaaaaaaggggtagaaacagtcgtggttctgccattctttactaaaatgtcagccgactatcaagaacagctggaagattgtttttcatttgaagtcaatgtgggttggcgtaagcaatattgtgggttgaagaaactagttctcaatcgtgttacctactattttatcgataatctgtactattttggtcgtgataatttatacgattattatgatgatggcgaacgttttgccttctttcaactagcaactatcgaaatgatggagagaatcgattttattcctgacgtgattcatgtgaatgattaccatacagcaatgattccttttcttctgaaagaaaaatatcattggatcaatgcttatcagaatatccgcaccgttttgacgattcataatattggctttcaaggatggtatagcaaagatattttaccggacttgtttggcatggggacagagcgttacgatgacgggacattacgattaaatgactgtttgaatttcatgaaagcaggtattttatacgcagatcgtatcacaacagttagtccttcttatagtgaggaaatcaaaacaccggaatttggttgcggacttgaagtcattctaagaatggaatctgggaaactgcaaggaatattgaacgggatcgattatgaaaccaacgatcctgcaacagatccattgctgccctatcattttacttccgatgaaatgtccggtaaagctgcaaacaagcaagaattgcaaaagatgctggggctaccagcgcgtgatgtgcctcttatcacagtggtcagccgcttgactacacaaaaaggctttcatcttgtaatgccggaaatggaaaacttattgcaatttgatgttcaatttgcgcttttaggaacgggagaaccggaatttgaagaaggattccgttactttgctgcaaaatatccggaaaaatgtgccgcggtgatttcttttgatattggactggcgcaaaaaatgtatgccggagcggatctgttcttgatgccttctgcttttgaaccttgcgggctttcacaaatgatcgccatgcgttacggaacattgccagtcgtgcatgagattggcggactaaaagatacggtagattcatacaatccaatcactcatcaaggcaccggatttggtttccaagagttcacgtcattttatttgatgaatgcagtgaaacaaggaatcctgctttatcaagacgaccagcaaacgtggaaatctttgcaagcacaagccatgaataaagattttagctgggacattagttccaatcaatatattgatctctaccaagcgatcaaagtataatcaagtataagacagaagtattcattagtctgaaagtagagcgggtttgacagaacgacctagcgacaagggcgattggtgcttctgtcctttttcatacaaattgatagtcataaaggagtgaattgtaatggagaaagctaccttgcaagaattattagaaagccggttgaaagatattttttcgatcgagatcgcagaagcttcaccgcaagaattgtttttagctttagctaacgtggtcaagagctgctacgcgaatgattggagccagacacgaaaaaatctgctcgttgaacagcagaaacaggcgtattatttctcgatcgaatttttacctggaaaactgttgaaaagtaatctactgaatttagggttgctggatactgcggaagagctcttcgaagagttatccttttcattagatgaagttgctgaagttgaaaaagatatggcattaggaaatggtggactaggacgattagcttcttgtttcatggattctttggcttcattagggttgccaggaaatgggaacggcatccgttataattatggcctttttaaacaaaagtttgtagatgggcatcaagtagagctgcctgacgactggttacgtgccggaaatgtctgggaggttcgaaaggagagtaaagccgtggatatccaatatggcggcgaagtgtacttgattgaagacgagaatgggaggctgcgtcctgaacggcatggtgggtatgtctggcgtgcggttccttatgataccggaatggttggctatcaaaatgatatgatcaatacattacgtttgtggagcgttgaggttcctgcagcggaagaagccaactatgcaaccattgaatctcgtcgttctctagaagatctgaccgctgtcttgtatccagatgattctaatgaacgaggcaagaagactcgacttatgcaagaatatttctttgtctcagcaggcattcaaagtattgttcgctactatttaaaattgaatcatccgctaacgatgatgagtgaaaaaattgctatccatatcaatgatacccaccctacattatgtgtatccgagttgatgcggttattgttagatgatcatgatttgccatgggaacaagcatgggcaatcacagtgaaagtcatgagctataccaaccatacgattatggctgaagcgttagaaaaatggccgattgatctattcaaagaagttattcctcggaattaccaaatcattgaagaaatcgatcgtcgttatcttgaagagtatgcagaggttcacgaagctgcccttcttaatcggacgcgtattattattaatggccaagtccatatggcgcatttagcgattattggcagccatagtgtcaatggtgtcgcaaagctccattctgatctgttgaaatccgttgtcctacatgatttttatttgatattcccagaacgtttcaataataaaaccaatgggatcgcacaacgtcgctggatgcagttagccaaccaacctttatcaaaggtgcttgatacgactatcggcaaaagttggcgccataacccgcaagacttgcaattattgaaaaattaccaagaagatccaacagttttgcaacgtctagcagatgcaaaactgaccaacaaacaagcgttagctgaatatatccagcagacaaccgggatcgaagttgatccaaccgcgatatttgatgtccaaatcaagcggctccatgcgtataaacgacagttgctaaatgtgatgcatattttgaaactatactttgacttgaaagatgaacctcaagcaccgattcatccacgggtatttatttttggagcgaaggccgcacctagttatcattatgcgaaagccattattaaagtgatcaatgaagtagctaacctgatcaatcatgatccgacaatcaatgataagctgaaagtcgtctttttggaaaactacaacgtcacattggctgagcggatcattcccgcagcggatgtaagtgagcaaatttccttagcatcaaaagaagcttccggtacgagcaacatgaagctgatgttgaatggggcagtcacgatcgcgacattggatggcgcgaacattgagattcgagatgcaatcggagatgagaacattgccatttttggattaacagaagaagaggtctatgcttattatgcccaacaaaactattctgcgtatgcgttttacgaagaagatcctgtgctgcaacgggtcgtgaatgcatttattgatggaacgatcccaaatatagaaagagaaggtcgggaagtgtttgattcactattaaaatataatgatgaatacttcttgttgaaagacttcaaatcttattgtgatgcccaatatcgcgtggatttagcttataaagaccaacagcgctggcaagcgatcagcttgatgaatattgcgaatgccggcaaattttccgcagattatacggttcaaaattatgctgatgacatttggcagatcgaaccattgtatgcacatgtcaaagagccaaattcagctagtctgacgtaataatctattgtacttgctcattgaatattcccaaaagacaccacagctttcgtgaattattcactgaaatatgatatgattagataaaatcgcaaccagaggatgagtgaattggcaaattatttagatgtgaaacgcaaacatttccgttttccagcatatgatgatcaagaaggggtaaagctgcagtccgaacacaaggaagttttcagtcagtctgatgattggattttgacagaaatcaaggatcaacctagcacgagcagcaaagaaaaggattctgctcactcattgcgtcggaaagttccttccagtcaccccaattacggtcatagtgtgcggcaaaaagaagaattagcgcaacatcgggcaaatttaccaagctatggaaaacgacctttgcaggaaagtacacctaccggcaaaacaaatctttttggcaatgatcaacgacgtgcttcttataaagtgacgagtaaagcagaacgggctgaaacgccaacaccgaccaagaaagagtattctgggcgatcttattttgttcccaaatacattcctgcatcgatcatccctgaacaagaaaaagaagagatcacttcacaagaactgatggattcaatggagaaaccccgcgaatcctatttgctctttgatactgagccagcagcctaccaagtaaaagaaggcgatgatcccacggtcagaaagttcaatcgaccgcaatctgtaggcatgacacggcgggaatttcgcggcatgaacaaaaaaaacggcgataagcgagctgttctagatcgttccttagaaggaatgatcgaagaggggcagtcagaaagcaataaaaatggctactttcgctcttgatgagtaggacaactgaaataagcaaaggcactcgtgagaatctctcgctcaacaagcagttgggagttattcgttaataaaacaaggataatgatttaaacaacaaagaaagcaactatctgaattgtagatgaagctgtggcgctagcttgctggatgaagtaagctgacaaaaccagtcgctatcatctgtgatttggatagttgttttgtgcttcagaataccgctagtcttttcaaaaaatatcaagaaagctgaagcgacaatttccgttaaagaagcggcagctgtcctccttgtttttatttgttgaaagaaaacggtgactaacagatggcaacttctcaattattttcacttttgagaagcatttgctattcttaaaagaggagggatacgggatggaaattgatttgcaaatgttagcgatgatcttctttatcaatatggcttatgtcacattgaatacaattcgttttttattgacgatgaaagggtatcggctgattgcaccgctggtcagtatggtcgagatcacgatttatatattaggattgtcgatggtattggatcgcttagacaatccattgaacctactgttttatgcattaggttacgccgcaggagttagtgttggaatcaaaatcgaagatcagctagctttaggctatacgatggtcacggtgattttaccgacgaatacagatgaagaaaagaatttgccaaaaattttacgccaagaaggatatggtgttactcaaagttacggagaaggattagaaggtccgcgattgatccttgaaattctctcacaacgcaaaagcgagaagaaactgtttcaaaaaatcaaacaaatcgaagaacgggcctttatcattagctatgagcccaaatatatttctggcggcttttggacgaagaaaatcagtcggagagaagctcgggtcaaaaaagaacaaaaaaaggaatagctctttttctctcctgtgcgacggtccttttttgagatataataggcaagaatttggtttggaaggaagcgaatttgaatggaaaaacaagcaaacggcatgatggcggtgatagcagcactcatctcgaatattttagttgccatcagcaagtttgtcggctacgcattgagcggcagtgcggcgatgttgaatgaaagtattcacagcgtggtcgattgcagcaatcaaatctttctgttgatcggtgataaacgagcaacgaaagggcaaagtgaacttcaccaatttggcgaaggacgcgcgaaatacttctttagtacgatcgtagcgatgatgctgttttttggtgggggcgctctaggtgtaatggaagcttttgaaaagctgctgcatcctgctcatgaagttggtaatacttggctagtgattggtattttgcttttcggtttagttgtagaaggtagttctttgtggatcgcgatcaaagaaattcggaccttgaacgtagaaaagcagcctatttatcggtttttgaaagaaagtcgccatagtgagatcttgattatctttaccgaagacttttgtgcagtgattggcttgatgttggcaatgggtggaacgatcttgacaatggtcactggcaatgcgttttttgatgctttcagtggcttgctgatcggtattttgttgatgattgctgctatctttttagcacgagaattttacagtttattgattggcgaaagcgtgacgaaaagagatcttgtactgatcaaagaagcctttgatcgtccagatgtcgatcgattattggatatcaaaaccgttcatttaggtcctgcggaaatcttagtcgctgccaaaattgatatcacagcaaaacaagaggagatcggttatcaaatcattaacgagatcgaagcaaagatccgcagcttcatgccggataaaaaaatgtatatttatattgaaacggatgagtatgatcctcattatatggagaaacggcgaaaacttgtccgatcacaagactgatttttgtagaacaaagccagtttttttgatacaatagacaaggattatctaagacgaaggagaataaaccattatgatcaatgcaagtgatttaagagcaggaatgacattcgtgcaagacggcaaactaatcaaggtattagaagccagccatcacaaacctggtaaagggaatacagtcatgcgtatgaaattgcgcgatgttcgttcaggttcaacctatgatacaacattccgtccagaagaaaaatttgaaaaagctcatattgatacgaaagctgttcaatatttgtatacaatggacgatacagcgttcttcatggacttggaaacctatgaacaatatgaaattccggttgaagttgtagaagaagaaatgaaatacattctggaaaacatggaagtgaagatccaattcttcggcagtgaagtgattggggttcaattaccatcatcagtcatcttgaaagttgttgaaacacaaccgtcgatcaaaggtgcgactgtgactggctcaggtaaaccagcaacgatggaaacaggtttggtcgtcaacgtacctgactttatcgaagaaggcgaatctctagaaatcaatacttctgaaggtacgtacatcaaacgcgcgaaataatcattttctagaagagccaaggttttatgaacttggttctttttcttttagaaagaaggatcaacatgaatgtacttgttgtggcattttttgcattttttggcggcatggcacgttattttcttgcttcggaattgccgtcttggggcatcttccctttaggcacattactggctaattttattggctgttttatttttagctttttagtcaagcagatcatgacgaaaagacacttgaatggacgtttgatcttgggcatggggaccggattttgcggtgctttgacgactttttcatcctttgcacttgacacggtgcagttgctgcaaaagcaagcctatggattagcgacggggtatttgatcctgtcgatttgcggcgggttattttttgtctggttaggcgaagccctcgttagaaagcaggtgtaagtatggcatatatcgttgtaggaattggtgcagccatgggcgctgtcctgcgttatggtatcaatcgttattttgaacgaagaccacatccttttcccaaagccactttgctgattaatttatctggtgcgttgatactagggattcttgccggtcttcagattgatcaacactcgtatcttttgcttggaacagggatcatgggcggttatactactttttcaacaatgacgattgaattatttacattgctaaagaccaatcgccagtacttttatctttattttttcagtacgtacattgtaggattgacggctagttttattgggttgatgataggtgcttatttgaactgaaaaggagtagacgatgattgcattcatgtcagcagaaatgtggcttaaaagtgagtttttttattattcaatcgttccggttttattagtcgttggattagtggcgcttttacttttgctgatccttttgttgtatcgggagaaccggcggcagggtttgatctggctgcctgtcgtagttttgttgctttgcggcggcggtttcttgttaggagatcatttttttcacgactttaaaaatgacaatgcacaaattacgccaaatatccgcgatcgggaaaaacgctttatcggatataaatattatgatcagagcacgttggcggcttatcagcgaatccaaagtgaagccattccttctctggggatctatcaagcagaaccggttagccgagaaatccaatttctgggtattgcgcacaactctgtgtatttcaaactaggagaacagtattactatttgcgccaagagccaatctttgcgaaacaagaacaagctgagctgcaaggtgtccaataccatctgattgagtccgcttttgcagacatcggtttttttacagaaacaaacaattatttaacagccatcgttttgcctgagagcaaaaaagagttagtctatgaatccattgatgggatcttgccaaaagagtttggcaaaagtcaaacagcttgggcagtccctggaaaccaataaaaaatgtcattacatgagacaaaaggataggtgaatcatccgattcatctatccttttgtgatgtctttacttcccattgaagattgagcattcaaaacatttttttctttctgttcagtcaaataacgttctttgtgtttgcgcaccagttttttaaaggcagcttccgcttttgtggcttcactacgggtagcaaaacattccgcatggatcatttgtaaggggcgacgactagctggatgagtgtactttgctccaatgccttgattgtgttgatgcaggcggcgtatcaaatctgtggtataaccaccgtaaaaggtattgtctttacagagcaatacatagaagtaatgcgtatcagctgccataaagcatccgactcacttcctcactgtagctcccatccgcatgataagtgatcagcggtgaggcaatcttgaaaccatcagctttaccatccttgatgccctcgatcaataggatattcgcgtctttccctgctttgggatagacgaaacggacacgtttgggggcgattcgatattttctcatgcagtctaaaatatccaaaaaacgatcaggtcggtgaaccatagcaaagcgcccattcattttcagcgctttactggctgtgtagaccacctcgtctaatgtggtctcgatttcatggcgagcaatcgccagataaggattaggatttttaacagcagtgggaacatttttgaaatagggcggattacagaccaagagatccaccgagtccggtttgattttggtaaagatgttttttaaatccattgggtaaaccgttatttgttcctcaagcccattcaagcttacactgcgttgggccatatcagccagccgatcctgcagctcgatctggtaaatgtgagccgaagttttacggctgataaacaagccgactgcaccatttccagcacacagatcaacgattcgtccccgtttgggaatcgttgggaagttagctagcaaaacggcatcgagggagaaagaaaagacctcgctgctttggatgattttgatatcttccgcatataattgatctatgcgttcgtttgattgcaacatgaaagcatactcctgttctaattcatttcctttgtattatactacgattaagaataatcggaaacgacaaaaaaggcttgtcatttgaagcgtttttttgcatacttataaaagaaactggaaaggaaagtgagtatgttttttagctttatgcgaggcgtggttcgggtcattttgtttttgatcaacgggaacgcccgatatcaaaacaaagaggctttgccgcaaaatgaaaattacatattggttgcacctcaccgtacctggtgggatccgttgtatctggcggtggctgctcgtcccaaaaagttcagctttatggcaaaagaagaactgtttaagaatccaatcttgcgctttattttgattcatgcgaatgcttttccggtaaagcgtgacaaaccagggccgagtgctgtcaaaacaccggtgaaaatcttaaaagatacagatctgagtctcattatgtttcctagcggaacaagacattcgaccgcgctgaagggtggcatggcactgatcgccaaaatggcgaaggtaaaaatcgttccttctgtttatcaaggtcccttaacgctaaaagatttatttaaacgtcgacgagtaaccgttcgttttggggaggcgatcgatatcagtgatatcaagaaaatggataaagaagggttagcagaagtggaacgccgcattcaaggtgcttttacaaagctcgaccaagaaatagatccgaattttgtttatgaagtagaagagaagaaacgttgatgcgtttcttcttttatttttgactgtgttttaaataaatattgaacttgataattttttgaggatatgctatgagataatcaataacaagggtttagttacaggtttagagggcctattatggcaaatagtaattctttgatttcagatgttcaaaaattatttgtgaaagtagaatatataaatacaattagatacttgttttatagtgcaaattaaaatgaagatttttacacatcgaggaggtaaaatgatatgaagccaaaagaaatactttgccaatgggttgacgcatttaatcatgcggatgtagaaattatttcagaattatatgatgacaatgcaataaaccatcaggttgccaatgagccagttattggaaaagaggctataaagaaaatgtttgaacaagacttctctaacgcagaaatggtttgtatcgttgaaaacattttcgaagatggacaatgggcaattttagagtggcgtgacccgttaggtttgagaggttgcggtttttttcaaatagtaaataataaaattttatttcaaagaggctactgggataagctatctttcttgaaacagcacaatttgcctattgaataaaatgaatagatatcttatataaatagtttgtaaatttcttaaaaggtgcattaagggaaggataataatttcccttaatgattgttagaatagtaacactgcgttaaaacatagtcttatttctaatttctaaagtaggcttgcttcgtgcttcttacctaggaaaagcagctccttattggtatgctcaaaaaaattttaaaaaggagtctctgttagacagaggctccttttttagctcatcaagagttattcagtgactggttgattttccttttccaattcatttttgtcatagatttttacaaatggataataaatgaggatggaaagtacaatcaaaagaatgtttaagacgattgctctccagtcaccgcctgttgcaagaaaggcaccaattggtcctggcaatgtccaaggggcattgacggtcactttgttgactaaaccagccgaggtggctacccaggcaattacaccattgactaatggtgcaatgataaatggcggaatcaaaattggattcaagacgataggcgtcccaaaaatcagcggctcattgatattgaaaatagcagggatcaatgcggtttttcctagttttgatccgaattcggattttgtacgaaaagcaagcaagatcgccagaccgatggttgaccctgcgccgccgatccaaatgaaccattggtagaatggctcagcagcaatgttgggaatcacatcgccagaagctaacgcagtggtgttgccttccaataattgcagccataacggccgtgccagtgaaccaacgatcgaagcaccatggatcccaaaggaccaaaagaatgtcgttaagaaagtgatcaataagacacttggcaagctatcggctgcgctaactagaggatcaacaacttttgctacgatggtatgccagtcaaagccaatgtaataggtgattgcccccatacctaaaataatgatcaatgttggcgttaaagcttcaaaagatcgagcaacagcaggagggacttgttccggcatcgtgattttaaatttagatttatccgtcaaacgataaatctcgacagctaaaatcgatgtaatgatcgctacgaacatcccggcactgcccaagtttgccattggtaaaacaaatccggctgtaccagcagcctccaaagcttcggggggaatatttattggcgtgaaagtcaataaaaaagctgtggtggctaagataccaccagagagaccatcgagtttataggaacgggctaagctaaagccgatcccgaatgcggcatataaactcataatgtacatcgtcatgcggtaaggaagcaagatcgtggtcgcatggctcgaaagaaattgatagattccccagtcttgtggcaggggaggaaaagctaaaatcataaaaaatgagctgacgataatcagtggcaaagtagagacgatcccatcgcggaccgcccgtaaatgccgttgactccccagtttttccattggtccagccaggtgacgttcaatgaactgtgtaaatttatctaacattttttaacctcctgtgaaaacgttcatatggttgaattaataaagttatgttgggtgattccgctctcctatgggaccaaatggatttgggatgatctttcccagaatcacggattgtttggcaccagtcgcggcaggagcattatttttatgtccctgtaaggtctcgtatcctaaaagggcaaatgccatagcttctttcgcatcattggaccaacctaaatcattttgggtaatcactgtaatctcaacgggtaagtagttgaccagcattttttttagtgttgaattatgcgcgccgccgcctgctaaaatcacttcaatgggtccgctttcaacaagtgggaaaacgaagcgccgatagctctcggcaatcgagtaggcagtaaaatcggtcactgttgctattaagtctgctggtttttctgcagaaaaatctgctaatagttgatcactgaatgcttgaccaaatagttcccgtccagtgctcttagggggtgcttgatcgaaataggaatgatttcttaattgtgtttgcaatttaggaataatggttccctgttgagcaatccttccttcagcatcgtaaggaagttggaataattgatgcatcagttcatcgatgatcatatttccaggaccagtatcgaaggcgacaagatcacttaatgtgccatttttcggcaggaccgtcacatttccaatcccaccgatattttgcaataagcgggttttatcaggggaacgatacaagagataatcagtataaggtacaagcggtgctccttgtccaccagcagccatatccatcgcgcggaaatcggcaaccacagttgttccgagtccgtaggcaatgattgacggctctccaatttgaaacgtactggaaacaagcgggttttccgagggtgcatgccaaatagtttgtccgtggctagcaacaaagtcaatgctagtttcggttactgctgtttcttggcagacctgacgacaagcagcgagaaaggcatagcctagctcaacatttaactgacagatcaaggaaacagaagagtcctccgggtcacaggcttgttttattctttggcgcaactcgggggaaaaagcagtagtcgtcagatgcaacagacgaatagatgactgtgaatgattatcgatttctactaatgcggcatcaacaccgtctaaactagttccagacatgagtccaattccaagcattgtttctcctcctttcttttatgtttgtcgaaaccaaattagatgaacttgggcggaaatgtattcggtttcaacctcgtctttattgtagtgtatgtgtaattgcatttcaatgatttttttgtaaaaggaaatttaatttcattaatttgacaaatcagtgtgagaacccgtttggaaaaagaaggactcaattgtctgggaacgagaagatcacgttgatacattcaattcataatcgtaaagtggtataatgatgggaaggatatttttaagagggtgggtatatgcgttttttacatacagcagattggcacataggtaaaaaattacacggctatgatcttctcgaagatcaaagttacattattgaccagataattgatctggcggaagaacaatcagtagatgcaattatcattgctggggatctttatgatcgcacggtgccagccgttgacgcagtgaaatgtttaaatgagaaaatagcgaaaatcaatttagaaaaaaagtttcctttactagcgatttctggtaatcacgatagtccgacacgacttgaaactggaagtccatggttcaaaaatacgcaattttacctaacgacctccattgaagaaagtattgagccgattgaattttctgacacccagtttttcttgttaccttattttgaaccgatcgaagcgcgtttgttttttgatgaaaaaatcacaacgatcgcagaaggggtgactcgggtccttcaagagatgaagcagtattttgattctacgaaaaaacaagtcctggtgactcacttttttgtagctggttcaagccagacggattcggaaaccaaaattcaagtaggcggattggatagtgttccgacaacggcgtttgaagggtttgactatgtcgccttaggacatctgcatgcaaatactgcgctaaatcatgaacgaatccgttatagcgggtctccgttgaaattttcattgtctgaaataaccaatgagaaaggtgtttatatcgtagatactcaaaaggaccagcagcatttttatccgttgcggccgaaaagagatcttcagcaatacactgcttcttttgaaacattgcttgatcctgccttttatcggcaagtggatcgagaggccttcttacacttcacgttaacggatcgagccgtaattcctaatatgatgaatcaattacggcgggtctatcctcgaattttatctgtggagcggcaaaatgggcgaaccgtcagcaagaaaaatttgacattagccgatgaggaggatccgcaacgggtgatcgcccatttttataaagaaatgactggagaaccgttaaatgagcagcagcaaaaatggctcacaggtttgacagcgggtggagagaaggagcgagagaagtcatgcagccaagaaaattaatcatgaaaaactttggtccctacattcatgaggaactggattttggcgactttcaagaaggtggtttgtttctagtcagcgggaaaaccggggctggcaagacgacgatctttgatggaatgacatttgcattatttggagaaacttccggaaatttgcggtccggtaaagaaatgcgttcgacattcgcttcccccacagaagagacgagtgtccgtttttcctttgaccatcaacatttgcactatgagatcgaacgacgtcccgaacaagtcttagccaaaaaacgcggcgatggagtcacgaatcaagcagctaaggtacggttgacgatctatgatcagcaaggaaaagagcgcaaacaaatcagcaaaaaaaatgaagtagatatcttcatcaaagatctgctgcaattggatgccaaacaattcttccaaatcattttgctgcctcaaggagaatttcgcaattttttgatcgccagcagtaatgagaaagaaaaagttttgcggaatatttttggaacggaaatgtatcagcgcttcaatgaatggctgaaagaacaggtcaaaaagcaaaccaaacaaattgaaaaacaacaaacggcagcggatcatttggtcacacgctttgagtggaccgaaccggcaactccggtttcgttggttgagacattagcgtactggcagacagatcttgagaaacaacgaagtcatcagcaaacaattgaagcaaaaaaattccaagcggagcaagagaaaaagaccgcacaggaagctttttatttggcaaaagaaatccataaagcacttgccgagcaacaggaactcagccaacaggcagcgaatctagctgcgaaagaaagtcaaattttagacgataaactgcggctgcagcagctagactgggcgagtgagcatcaagaaatcttacgccaaaaagatgagcggacagctgaagtagcacaggctattcaacaacttacattcaatcagcaatcattagaacaatggcaagagtctcaagagatatgggacaaaagccgagaagttcaggtagatcgaaaggacgaacatacagcagctaagcaacgtttacaaatactggcacagttaaaaccattagccgagcaagttcagcaacaagaaaaacaggtcgcttctttgcaggaaacggtgactcaacaggaaaaacaagcgcagcatctgaaagaacagcaaaatcttgctatgaatcaggagcaaggattaaaagaagaaatccaaaagcattcgatctaccaagtacaggaagtccaactggttcgtggagaaaatctgttgtaccaatggcagatgttgaaaaaagaggagcagcagctgactgatacccaacagcaactaacagaccagcagcgaaaattgcaagagaagcagcagcagttagtaagtaaatatgatgagttaactgaagaattggtgcaagaaaaaagtcgaaatgccaagatgcagattgctcgtttgagtctcttattggtggagggggaaccttgtccggtctgtggctcttttgaacaccccgctgctcaaaaacatacagagtatagtaatgaagaaatcattgatagcgagcagcaacttgaatctttggagaaccagctgcaacaagttggtgaagaccgttcgacgaacttgctgctgctagaacaagtcaatgaccagtttcaaacaattaaacaaaaaatgagcgcgttgaaggaaaaacaacagacaacgtatcagacactgcgagaaatcctccagccgttgatggaaaatatgctaggtcaaacagtcctgaaagaaggagctggcaaggaaccagctgacccattgctggtagaaggattgactgaaaaggaaatttccactacctatttcaaatgccaacaaatcaatcagcagttgaaagagcaatttgctctagacagacagaaattgacagaggtccaaacaaacagccaacatcttacagaagaattgacagcacttgaagcaagtctcaagactgctagtgacgctttacgtttggaagaaggaaaactgtcctcactaaaagagcaaacggagggagtatctctggagcagttgaacgaggaacaggagcaactagcagcacaatcgtctcgtttagcagctctgattgaagcggatcagttggaagagcaacgtttgaaggaacagtatacgatcctgacagagcagcaacgaaatctgcaacagtttctagccgacaagcaacaagctgctcagctagcccaagaacgcttggaagaagtcttgcctgcggcatgtaccgaacaacagatgcgcagtctgctcaatgatcttgaggaacgccaggagctacgcagtacgataaaaacctatgaacaacaacaacgttttgttcaacagcgacagcttgaactggcacaatttttgcaaaacaaagctgtgcctgacttggaagtcttgcaagaacaagtagaccagtctgaaacagcggtagaacaattacaagaacaagtaatccgaggaaaagaacaaatcaagcaaaatcagcgattacttgaagaattgcagataatctatcaacaaaacaccaagcaattagaaaaaatcagccatttacagcaactatcagaagtcatcaatggagaaaatgaaaagaagaccagtttggaacgctatgttctgcaacgatttttaacagagatcttagaagtggcgaatgttcgcctagctcgattgacaagaggacgttatcaattcgagttggcagacaaagtggggagctatcgaagctcgacagggttggagatcgatatctatgatgataatgctggcagtcttcggcgagcacataccttatcgggtggtgaaagttttattgccgcattggcattggctatctcattagctgatgtgatccaaaatcgttcgggaggcatcgagatcgaggcgttgtttattgacgaaggatttggctcattagatgaagaatcgttggaaatggcgatggaagcattagaaatgattgaaaatgaagggcggatgattgggatcattagtcatgtaagagaattaagagagcgaatcttgcagcaagtcgttgttcaaacagatggcagcggacaaagcaaaattcgtacaaaactttagagaaaggaggaatcagaagcatatgaaatggagtattccagaaaaagtcattgaaagaggtcggacctatctaaatgaaggtcgcgtcctatcggttattccagatccagagagaaaggtatggcatgcggaagtcttgggaagtgagctatatttagtcgatcttgatgcgacggctaaagagatcgattattgccaatgcccctattgggaagaacatcactattgtaaacacactatagctgttgaactttatttacgaaagcaaggcaaaacaagacaaatcacagaagaaaaaaagccaacaaaagccgcattttcggcttcggagatgttttctcagggattcaatcgattgcagtctggacagcggacgatcactcctttgcaaattgaatatcgtgtcgaaaatctgaccacgaacccttaccaccaggagatggatgttctagggatttcactaaaagtcggtcaacggggaacttcaaagacgtatgtcgtcaaaaatatctataaatttttgcaagtctatcaagaaaaaaaaagctatctggcgaacaaacaaacagagtttcttttaacgagtgaagcatttgaccaaaccaacaatgatattctgatccgcttactaggcattgctcagacacagcagctgattggacaagctggcatccaagtgaaaggcaaactagacaaaaagtatttgctattgccagttgaatacgggaaagaactattagagaaaatgaacgctgcttatatgcagttaacgattggcaacgctaaacttcgtcaagtgactttttctgaaggcaagccgctgcattttcgtgttcaaaaagaacacggtcaatttccgttatctttgacgagggattttgatcacttgctgagctattacaattggggccttcaaggcgatacgatcgttgaattgacgatggaccaaaaagaagtctatttgacgatgcagcaattattcaaacgctttgaagaaccaacgatcatttatccaaaagcggaactgtccaacttgtttatgcaagttttgcctcatttacgcaagatcggcacggtagagatcacaaaagaggtcggagcagagatccaagagagtccgttagccgttgttttttcactgcgtaaaatcaaaggtcagatcgatttgcaaattgatttcaattatggcgaagtgactttttcgactgacgaaaagcatcaagtgattcctgaggcccatccagagattttaagggattaccctcaggaaaagcggatcgaacaagtagttgaaagaatgaagtatcaaaaaagtaccaaaaattggttcaaagcgctaccggaaggggaagaattgtttgcctttttcactcgtgaaattcctttactgcgccaactaggagaagtacgtatcggcaaaaaattgcgggaactttacttagatgcacagcagcaccgtccaacgatcgaaattgaagaaaatggttcctggctggatattcactttgatgtcagcgggatcgctgaatcggagatcgatgctgtcttgcggagtttgttgcaggctgatcgtttttacacgacagaaaatgggcaagttctttcactggaaacagaagcctttcaagaagcaagcgccgcgctgaaaaaattacggacagcctttgtatctcagtcaggtacgttacaagttccgttgaaccaaggattgtatttgcaagaagaactagctgaccaagcaacttttagtcaaggattcaaacaaatgacgacagatttgattcatccagaaaaattttctgcaccattgcctcatcagctccaagcgcaattaagacactatcaggaggtcggatttcgttggctgaagatgctgagtcagtatcaatttggcggcatacttgcagacgaaatgggattagggaagacagttcaaacaatcagctacttgttgtccgaaaagcaagagaagcaacagttgaatgctctgatcgttgcacctgcgagtttgacgtataattggcagcaagaaatcaaacgctttgcaccaacgatccggtcggtggtgatcagtggttctcgggaggaacgcggcagccaattacagctgccggcagatgtccgcatcacatcttatgccagcttacggcaggacatcgaccagtaccaagaattaggtttagcgtatttgatcttggatgaggcgcaaatggtcaaaaacagcggaaccaaaacagcacaagcgttgcgttctttaaatgttccccatcgatttgcattgagtgggacacccatcgagaataatcttgaagagttgtggtccttatttgagatgatcatgccgggatttttcccaaataaacaacgctacaaagaattgacgacacaagagatcgcaaaaatgatcaagccattcatattgcgacgcgataaaaaatccgttcttcaagatctgccagagaagttagaaacgaattattatagtgtactgacagaagagcagaaaaaaatctaccttgcgtatttgcgccaaatgcgggaagaaatcgcacaaatggatacagcagcatttcgcaaaaatcgtatcagcatcttggctggccttactcgtttgcgtcaaatctgctgcgatccgcgattgtttgtggaagattacgaaggcacatcaggcaagctagaacaggtcaaggacctgattcaagcagcaaaagaaaacggccgccgtgtgctcttattctcacagtttacaagcatgctttcgatcattgaagaagaacttgctcaagaaggaattgaaaccttctatttacgaggaagcactcctcctcaagaacgtttgagtatggtcgatgctttcaataatggagaaaaagatgtctttttgatctcattaaaagccggcggaactggattgaatctgacaggggcggatacggtcattctatatgacttatggtggaatcctgcagtggaagaacaagccgctggccgggcacatcgaatcggtcagaaaaaggttgtggaagtttggcgaatgatcgctgaaggaaccattgaagaacgaatggatgctttgcaacaagaaaagcgggaactattccaaaaagtcatccaagggaatgaagcccagctgaaccaaatgacggaagaagatattcgcttgattttaagcattggtgaagaatagattcagcgaatacaaaacccttgatacgaaagcaagagacagctaggatgcgaagatttgcatctatagctgtctcttagtttttagcgagccatcacaactgcatctgtaaaggataagataccttctgtcagctcttcaaaagcagttaacgtacagtcagggtgacaatttttgatttcgggagcttggcgtcggcgatgattcagccaaagggcttgccatcccgcttgtttacagccaaagacatcattgtcaaagttatctcccacgtataatgtccgtgagggatctaaatcaaatcgttcttcagcaagctgaaaaagttcaatatccggtttttggtaccctgttgcttgagaaatcagcatgtattctggatggatccagcgagtcaattccaattgatcgattttcttttgttggtgatctgttgggccattggtaatgattccaagcttgataggtaatgaagccaaggtattgagagtttcttctacggctggatgaagttggatgttgtctagctctgtctcgtaagtcgcttgaaacaatcggctagcatcatttgataaaggagagtagcctaaatcaatcagcgattgacatagtctaaaggtacgaaattcttctaatgtccattcttttgagatgacttttccaaaatggttatcgctatgtacgcgaaaacgaatataaagaggatggagatctgttgttgctacttcaggtatgatggttgtaaccgcatttcgaaatggttgttgttgatcgtataaagtatcatcgacatcaaagattaccgcattaagcaaaagagacacgcctttcaattgtagtgaaaattttcattttgttttcgaacatataatagcggatatcttgagagaaaaaaagggcttaaagcttgataaataaaggttttatttactaattttagaaatccttggtctcatcgctttttcaaatttgagtgaattttacccttttcaatcgatttctcattttgcttttccagaaagacttgcttataatgtagattaatgaaaaggaggaggacgtgtgttaaaaaggttttttagctattatcggccataccggtcattgtttgtcttagattttacttgtgctgtctttgcagggctgcttgaattggtttttccagttgccgtgaatcaagtgatcgacaagattatgccgcagaacaattttcggctgattttgctcgcttgtttggggctatttttattttatctggtcaatacgatcttgcaatatatcgtggtcttttatggccataaattgggtgtcaatatcgagacagatatgcgtcaagaattattccgacacttacagacacagtcttttgaatattatgacaatcaaaaaactggacgtttgatcagtcggctaacgactgacttgtttgaaatatcagaagttgctcaccacggtcccgaggacgtctttattacgatcatgacattgatcggttcattcttgctgatgctcaatatgcatgttcaacttgcacttgctacttttgcactgattccattgattacgattgcactggttttcttcaataagaaaatgacgaaagtcaatacagagatctatgacaatctaggtgaattcaatgctggggtagaagcagcagtcagcggcattcgcgtgactcagtcttttgccaatgagacgtttgaacatcaacgatttgacggtctgagcggcctttatcgtcgttcaaaaatcgtcttttataaagtgatggcaatcagttctgcctataattactttctgattcgactgatcaatttgtttgccttgatttttggggcctattacgtgatcaaaggggaattgacgaatggacagtttgttggatttatcttgttatccaatgtctttgttcggccaatcgaaaaggtcaataccatgattgaaagctatccgaaaggatttgctggcttcaaacgcctgacagaagagctggacaagagaccggcgattcaagataagccaaatgccatcgatgtacacgcactaaaaggcgatatcgtttatcaagatgtttcctttgcttatgcagatgcgacgaaggtattgaaccatattgatctaacgattcaatccggcgagactgtcgcttttgtgggacaaagcggttctggaaaaacaacgctttgcaatttactgccgcggttttatgaagtaactgagggtcagatcacgattgacggaatcaatatccaagacatgacgcttgcctcactacggggccagatcggaactgttcagcaagatgttttcttgttcccgggaacgattcgagaaaacattgcttatgggaaattggatgcgtcagaagaagaaattgctcaagccgtgaaactcgctcatttagaacaagtaatcgaccaaatgcctgaaggattggaaacagtcattggagaacgcggggtcaaactttctggtggtcaaaagcaacgggtagcgattgcccgaatgtttctaaaaaatccgccaatcttgatcttagatgaagcgacctctgcgttggatacagaaacagaacaagtgattcaagaatcattgaactcattagctgatggacggacaacattgattattgcccatcgtttggctaccatcaaacatgcgacaaggatcattgttgtcagcgataaagggatcttggaagaaggaacccacgagcaactgttagcaacagggggacattacaaagcattatatgatgcccagttcaaaaattagacgaaaaaagcgacttcgatcgcttttttcgtttatatgcaaataaacatattcagtggatatcgctgatttcttcaaagagatttgttaggatttacttatcaaacgctttctttgtttgtaacatttgtcatattcgttgccgatgaaatgatttttcactcataatgagcaactaatgacttggaatagaatacgtgataatacagattttcgtttctttgaaatcttttaataacaagttcttttctctgtttgtaagtttttaacgagttttaggtgtaaaaaaagattggtaaagaccaatgaaagagtactagtattatagaaagaaacttgtatagaggagtcagatattatcgaatattttatcaaaattaaaaaacgatagaattaaatcactagagtgatttaaataaatctatggttcatgatacaattttgacacactgttatacaaaagaaatgaaattaaaaaaaaatttgatttttctcatttaaattgatgtaaagtttgtgaaagcttttgtttgagaggtttctcttttaatataacttgagagttttattaaaaaatacaaaatttacactagattttttttaaatagttctgtataattaaaatcaagcaagacaacagaacttgcgaatggaatttaaaaaaggagagatgcacgttgttgacactatatacttccccaagttgcacatcttgtcgcaaagctcgtgcgtggttgcaagagcatgagattccttttgttgaaagaaatattttctcagaacctttaaatatttctgaattaaaagcaatcttacaaatgacagaagatggtacagaagaaattatctctacaagatccaaagtttttcaaaaattgaacatggatcttgatgacctgccgctaaaagatttattgacacttgtacaagagaacccaggattattgcgtcgtccgatcatgattgatgaaaaacgactccaagttggttttaatgaagatgaaatccgtcgtttcttgccaagagatgttcgtcaactagaactacgtcaagcacaattgatggcaggcttataaaaatcaaatagttatgagatcagtgaatgaaaagctgatctctttttttgccattttaggattttcttaagaggatatgcgttttctctttacttttcaacaggtttcgttaaaatgaacctatagtgattagcaaaagtgaggtgtagctaatatggaaatggaacatatcaatgaaaatacgatccgtgtactgatcaagagcgaagatttagctgctaggggcatcacttttcttgaccttcttggaaatcacaatgagattgaaaactttttttatagcatattagaagaagtagatattgatgaagaatttaaaggcagtgaagcggtgaccttccaagtcttacctaaaggggatggcttagaattgtttatcagcaaaaatctaccgcctgaaggaatggaaaactttgatgatatgagcgatggttcaactgaggacattacggatatgttgaagaagcatgtcgcgtcacaattacaagagacagagtcccagccggagttaggcaatcgttttatttttgaattgaacagctttgaagcaatggttcaattagcgtccgaagtgtatttggattcagtgaccacgaatctttatcaaatgaatgaccgttactatctagaagtccaatttatggataacgatacgacagacatcgaagttgagaatgcactggcttatttaatggaatttgctaaccggacacaagtcacttcagaggttttggcagagtatggaaaaatcattatggagcatgacgcattggaattgacccgttactacttcaaaaatgtctaatgttcacttataatcgtaaaagcgagaaaatggctacaatcattttctcgcttttttgcgtatttctttttgaggtgagaagatgattattgcgtatgacaaccagcagcagcggatcaaagctgatcaggcgaagaaagattcagaaccattttattgtccaggatgtcatggaccggtgcacttaaggaaaggcctcctgaaacgccatcatttcgctcattatgctgcggctaactgcgaagtgtttagtgaaggagagacggaggaacatttgtcagcaaaggagctcctctacgaatggctaacagatgaaacgatcgaaatagaagcttacttgccggatttgcagcagcgaccggatcttcttgtgggcaaaacagcgattgaagtacagtgttcggctttgtcttggaggcgctttgtccaacgaacagagaagtatcttgcctataactattctccttggtggcttctaggcaaacatctacagccgcaactccaccatcgatggaccgttttgcaaaaggcctgttgccgttttgcggagcaaccggggttttatttgtggatcatagatacacaagagcaacgcgttggtctcatatacgagatcaattggcattataagtggggtgtttcttttcgtagacgttattttcggaaaggagaacctatcggctgctgcccatcgctaaacaattattctagaaagtcctgtcgaacataccatcaaaggtggcagccggaagcttaccgagtctggttattacacaagctgatgcaacagcaaaaacagatcctcagtcttcaagcactcctttaccctctcggaggacatatcggcaatctgccgcattggtgctatcatcccagtgattatggttttttgttggaacatcgaattttagtcctgcgttttttatttcatcaaaatgcaaatcgaaatttttctcactggctgaatcagttgcgcaaaatgaattggaactggttgtttcctatgattgatcaagggcaactattgaaacgtatttatcaagaatgttctgatttccagaaaattcaacctttttgattctcttagctcggttcccaccaaaagtatgttaagattattttagtatgtaaaggagtgaagaatatgtcagaaacaaaacaattaccagatcgtgcggatctaccggaagcattaacatgggaccttacaaagatctatgccgatgatggggcatttgaagaagcgttccaagagatcgtggctgagttgaagcaggctgatgatttcaaagggacattatcacaaggaccagcagctttcaaggaagcattagaatatgtgttagcgatctcccgtaaactggaaaaactctatgtatacagtcatctgaaaaatgatcaagatacagccaacacaacctatcaagggctttatgcaaaagccagcaaccttgttgctcaagtaagtgaggcgattgcctggtttgatcctgaattgctttcaatggatgatgcaactatttggggttatttcgaccaagagccggaattggccatttaccgccatcttattgaaaaaactgtcaataaccgtccccatgttttgccggctgaacaagaagctttactagcaggtgcaggagaaatattcggcgcttctggaaatattttttcagtattaaacaatgccgatttagaatttccgatcgttgaagacgagaatggagagaaagttcaattatctcatggtgtttatggtcaattgatggaaaataccgaccgttccgtacgggaagctgcctttaaagggttgtatggtgtctatgagcagttccgtaatacatttgcccaaacattaagtaccaatatcaaagcccataactttaaagctaaagcacgccactatgagtctgctcgacaagctgcattaagtgccaaccacatcccggaaagtgtctatgacaccttggtagctgtcgtgaatgaacatttgccgctgctgcatcgttacatggagttaagaaaacgcttattggctgttgatactttgcatatgtatgatgtctatacaccaattctaggggaagctccgattcgctatagctatgaagaagctgtcgcaaaagccaaagatgctttaaaacctctaggtgaagaatatttagccgtggtaaacgaagcgtttgaaaatcgctggatcgatgttgtcgaaaataaaggcaaacgcagtggcgcctattcatctggcgcgtacgacacattaccctatattttgatgaactggaatgatcgtttggatcaattgttcacattggtgcatgagatgggtcacagtgttcacagttattttactcgcaacaatcaaccttatgtttatggcgattattctattttcttggcggaaattgcttcaacaactaacgagaacatcttgacagaatacatgttgcaaactgaaactgatcctcgcgtaaaagcctatgtcttgaatcattttctggatggatttaaaggaacgattttccgtcagacacaatttgctgagtttgaacactttatgcacgtagaagatgccaaaggaacgccattgactagtgaatttttgagtgacagctatggtgagctgaatgctaaatactacggtccttctgtagaaaaagatcctgagatcagtctagagtggtcacgtatcccgcatttttactacaattactatgtctatcaatacgcaacaggcttttcggcagcttctgcactagctaagaaaattttaacaggagagcctgatgccttaacgaaatatttgacctatctaaaagcaggcaacagcgattatccaattgaagtgatgaaaaaagctggagttgatatgactaaagcagattatatcaaagacgcgatgaaagtctttgaacaacggttggatgaattggaagcattagtcaaggaattagaagcataagcaagactgtcttagccactgaaggatcgttgatcgatcgtcagtggcttttttaagcaacaggttgattgccttattttgacggtgacgcctagaaaaaaagtaagtataggaaggatttgcttgtcaacagaaacctcaatttaaactttaaagtgagaaaatctttttttatgagtaagcaaattgcaagaagcaaaagtatttccatgttacgatagaaatgaaagaggaaagggggcctttggaatggacaaggaagaaatttttgcccgtcgcttggataatagcaagaaaaaacgggaagttgtcacgaaagaagctgtatctgcccacaaagagaagcagaccgaattagagcagaccgaattgccggatcaagaccctacagataaaaaagatccttcaaagaaaaattctgataggactgaatagaaaaaacatccaaacggtggatccaccctttgacggtctcttattaataggagaccaccaaaacgagggtgactcgatcagcgtttggatgttttattgattgtttaaagcaagacaagtcgtcgattcaacgagtcgatacgaggaacatcagcatccctgatatctttcttttgatagaataaacgatagttttcctgatctgttcggcaaaggtgtggaatatttctaagagcttccattccttctaataagacaccataatctcgttcacaaccgaaattatacactacagccgaaggagacatcgtaatgcccatttcgcgagcaacactttggtcggatgcgaaattctgcttgatcaaatcagacttgcgatcttctaaaaacatgtcaagatcgccgtttgtttcagcgaaaatctgtttgactaattcgaaggaataaggttctttatttacgcctacttgacattgaagtttaagtaaaaagtcgcgggcgatttttcgaccttgaagctgagctgctttgtagtccaatgaagcctgatagatttgactggtttgttgattacgcaatcctagatcggatcgatccattgaaaggtaatccattgaaatccccacagtgtgtaaattcatgattggtaatatatgcaattgtattttttttctttgatcactcagtgcgtccaacaaggtcaactcggattgataacaaattggacctatcggattcacaaacaaataaatctcgatcatctgaatctctccccaattaagattctttttcttttgtatatattaaatataacagaaattattataaatgagaaatgcctaatgagaactattcatactctttttttgacaacttctcttctaaggcacgaataattttattttttgctggacgataactgatatgcaggcgatcaagcaaagacaaaaatgctcgttttcctgaagaagcctctgagacttccagttcgagctcatagtcatgggattggccataccagctttcatctaaagcaagtaaaccttctgttacgctgaattctgctcgacgagtcgtcaactcagcaaaaggtttcacagctgccggatcaatttgctcttggatcaagcgatcggcaaccgcaccggtaaataagattctttgattctcacgcaaatcagctgcttcatctaacgaaaggatatcggtcgtttccaataacccttctttaagaggtgatttaagcgttaattctgctttatcttccgtcgtccgaatccgcaaaccaaactttttttgttttaattgatgatccaatgtatcaaaataaagatttgtttgggtatgaaaggcggagcgatcaagctgatagaaggcaaagactctctgatattcttcacgagtcaacaatgttttaaattcgatttctacttgatgtgtcattgttttcctctttccttacagtccatcaagtttacataacgatgggcaatatgtcaaatgaaaacccttggaagagttgaagcaaaaaagagctctgttatttttcttgcaggtggcaccgattgaacattctgttttcctttaagattgtggtaaaatagaaccgtatgttatgaaaagaatcgagggatagaaatgattcgagattgggaagattttttggcaccatatgaacaagccgtctcagaactaaaagtaaagttgcggggaatccgcaaacaatatcgagaacaaaataaacacgtgccgatcgaatttgtcacgggtcgtgtaaaaccagtcgatagtattttaactaaaagcaaattgcggggaatccctttggatcgtttagaagaagaaatgtcagatattgccggcttgaggatcatgtgtcagtttgttgaagacatccatcaagtagttgatcttttgcgcacccgacatgatatgaaggtaattattgaaagagattatattacaaataaaaaagcgagcggttatcgttcctatcatttagtgatcgagtatcctgtccaattgatcgatggtgaaaagatcattttagcagagatccagattcgtacattagcgatgaacttctgggcaacgatcgagcattcactgaattataaatatcaaggagaatttccagatgaaatcagcgagcgcctgcgtcggtctgcagaagctgcctaccaattagatgaggagatgtcgaatattcgcgaagaaatccaagaagcgcaacggctgttttcacatgggaaaggcaatcataaggaacagcggcagggggatgaagcatgacagggatcaaagtagcaattatcaacaatcaagaagaaaagtcgatgcttgtcacaaagcgattaacagaattgttggcccagtctgacaatacgattgaccaagagaacccagaattggttatttcagtgggcggagacgggacactgttgtctgcgtttcacttgttcagtcatcgcttagcagaggttcgttttttgggggtccatacaggacaccttgggttttataccgactggcgagactatgaattggaagaattggtcgatacgttgtgcaatgatcgtcaaaagagtgtgagctatcctttgcttgatgtccgcatcacttataccaatgggaaatcagacaaacattttcttgcattgaatgaatcaacgatcaagcggggaaatcggacaatggtagctgatatttcaatcaaagaagatctttttgagaaatttcgtggagatggcttatcgatttcgacacctacaggctcaacagcttacaacaaaagcgtgggaggggcagtattgcatccaagtatcaatgcttttcaactagcagaaatcgcttctttaaacaatcgtgttttccgaacgttagggtcaccgatcattgtcggagatcatgagtgggtcaaagtcaaactacaagctagtacggactatctagtgaccattgatcaatttacgattgaacaggaagaaatcgatgcgatttattatcgtattgcagacgaacggatccactttgcctcctatcggcatatgcacttttggaaccgtgtcaaagatgcgtttattggagaaatttaacagttatggaatttacttatcattatgagcggcaagagccgcaacagttaaaatactttttgaaagagcaagggatttctaaaggattgttggcaaaaatcaagtttcaaggaggcaagatttttgttaatgaccaaagacaaaatgtcttgtattctttggtgcaaaatgatacggtaaccattgtgatcccagacgaaggtgaacatgaaacggtcttattagatgagacgccaatcgagatcgtttatgaagaccagcatcttttgattgtaaacaaaccagcaggcattgcctcgatcccggctcaatatcatcctaatgggacgatggctaatcgtgtcaaagcttattataaacagcaaggttatcaagatcaggtcattcatgtggtcactcgcttagatcgggatacatctggattgatgttgtttgccaagcatggctttgcccatgcgaagttagatgttcagctgcggcaaaagcaattgataaaaaaatatcaagcaatcgttgcgggacagattcaagaattggcttctcacggagaaatcacttatccgattgcacgagatctcagttcattattaaaacgaaaaacaagtttggaagggaaatccgcacgtacggaatattggttgacgaaaaaggatcagcaagttgctgtggttacgattcttcttcataccggtcgtacccatcagattcgcgttcattttgctgccatccattgtccattactgggagatgaactttatggcggtgcgatggatcttggcattgatcgtcaggcccttcattgttgcgaattggcttttacccatcctttcagcggcaaatcgctgcattttaaagcagacttgccggcagatatggcatcaatcaaacaagcaatgagtgaataaaagaggtgaagagattggatgaaaatcaagaacttaatgagcgctttgagcagctgactcaggcgttgaatgaaacagatatccaaaaatttcgtgaagtgtttttggatctgcatatttatgagcagggacaattctaccaatctctcgatgagtcgcagcgccaaatcgtttatacgtacctttcacccaaagagttggcggatatgtttgacgtgatcgaagaagatgatgaacatatgacagagtatctttcggaaatgcgtcccggctatgcggctgacatgctagcagagatgtataccgacaatgccgtcgatcttctgaatacgttagataagaagcaagtagcaaaatatttgagtttgatgccggcagaagatgctagtgaaatcaaagagctcctgcattatgaagatgagacagctggttcattgatgacgacagagtttgtttcgatcgtggccaatcaaacggtacgatccgcaatgtatgtcctaaaaaatgcagcagatgtcgccgaaacgatttactatatttatgtcgtcgatacggacaacaaactggtcggagtaatctctttgcgggatttgatcatcaatgatgaggatacgatgattgcagatattttgaatgaacgggtcatgtccgtgcatgtgggggatgatcaggaagatgtagctcagacatttcgggattatgactttctagctttgccagttacagattacgatgaccatttattagggatcgtaactgtcgatgacatcattgacgtaatcgatgatgaagctgccagtgactattccggattagccggggtcaacgtggaagaagtcagtgaaaatcccctcaaagcctcttcacgacgcttgccatggctgatcacattgcttttcttggggatggcaacagcaagcttgatcagtcattatgaagagcttgtaagtgaagcaagtattttagccgtttttatttcattgatcactggtacagcaggaaatgccggtacgcaatctttagcggttgcggtccgccgtttggccatctcagatgataaagaaaaaagctttatgcgaacggtgatcggtgaagtcctcacagggttagtgactggtgctgtcaccggtttaacgatttttgcgatcgtggctgtctggaaacaaaacccgatcttaggttttgttattggaatggcgatgatgtgtgccattacggtagcgaatctcgcaggaagtctgattccaatgttaatggataaattaggctttgatccagccgttgccagtggtccattcattacgacacttagtgatttgactagtgtcttgatttatttcaacattgctagcttatttatgaactattttattcgttgaaaaaactaggtattcctttcaatcaaagtagatccattcatcaaaagcgaagcgcctcttttatataagatacgcctcgcttttttgtcttattcgtatcgatgatgggaccatgatggtaaatttatttttgcaacttgggaatgactgacgaaggagaaacgccaaaaagttttttaaaagacttgctaaagtgatacgcgtcttgataaccaacagcagaagcgacttctttgatcgtgagtttctcgtttgtcagcatatctctcgcacgttttagccggatctcgattaaataattgattgggctgactccagtagcctctttaaaaacttttgaaagataggttggactgagaaactgatcttgtgcgagcttttctaaagtgatttcttctttatagtggttctctaaaaagtagatggtgtagttaacgatttgttggtggcggcgttggcttttcgtgagatagggaaccacattcagacgtttgtcgtttaagcctcttaatatatagaccagcatctcgatgatcaatgctttttgcattaattggaattcatcttgctcctcattactctcccgaacgagctgccacgctttatctaaaacttggtggtggtattttcctaaatccagtaacggttgcttgttggggaaaaagttgcgtttgaatccttctaaagaaatattctttaagccaatatgcagttggtgggaacaagtccctgactcctgaaactcacaatgattgacaccagggttaaacaacatgatactgcctgccttgattttagtagctggcgcctcttcaaaataataattgctttctccttccaaaacgatactgatttccaagaaatcatggtgatgcatttctccatgactttcagactgtgtccaaggatcaaacaagtagataatttcgggattaaaggttctgggatttactagattcattcatttatcactccaatggtgtcagaacctggtaatttcaggtcgacggcttcttagtaatattttacatcaaaatgagtaagaaaaaccattttaatcgcctagtaaatcgctaagcttaacaacgagagggggaattagatgagtaacacacaatggatctggcgatatgcgaaaaaaaatcgtggccgaatcattttagcaatcctgtttttacttattaatgctgcgttgatcgtcgtcaatccatatctagggggaatggtgatcgatgatgtgatcaatcagcagcaaacggacttattgattccattattactgattatgatcgcaacgacagtgatccgaaccattgtccgctatgcgtatcaactattatttgaacgagttggacaaaacacgctctatcatttacgagaagatttgtatcacaaactgcaagaactggattttgacttctttaatcatacgcgagttggggatattatggcgcgtatgacaggggataccgatgctattcgacactttgtttcttgggtgacctataatatagccgaatgttttttgtggtttttctcagccgtagtggtcatgagttttattgactggaaattgatgcttgctttagtcgctgtgacgccaatcatctttctattaacgaatcaaatgtcaaaaaaagctcatccattgttctttgagattcgggaaagcttttctcggttgaattcgatggtagaagaaaatattggtggtaatcgcgtcgtcaaagcatttgccagagaaaattatgagatcgacaagtttaaagcgtacaaccaagatttcaagacccgcaacatggcttctgccgaagtatcccgaacctatttgccttggttggatggattagccggaagtttgaatgtcattgctttggtcttaggaggaatctttgtgatcaatggagacatgacattaggtgatctagtggcattcaacgggtacctatggatgttgaataacccgatgcgaatgagtggctggctgatcaatgatgttcaacgtttttctgccgcctgtatcaagattcgtcaaatgctcgcacaagagtcgaaaattcctgtccatgaaaagaaagccttggaaccaatcaaaggctttgtggaatttaaacatgtttcctttcatttttccgatgatccggatcaaaatgttttggaagatgttagctttaaaatcggacctgggcaaacgttagggattttaggtgaaaccggctctggtaaaacaacattggtcaatcttgtaggccggttttatgatcctactgagggtgaagtgctgattgatggcaaaaatgcgaaagaatatccggtccgccaaatgcgggagaacatttcaatggtcatgcaagatgtattcttgttttctaacacgatctctgacaatatcgcttttggaaatccgttggcagacgaaaactttatccggcaaatggcggtggtagcggatgccgacacctttatttcccgaatgcctcaaggttatgaaactatcgtcggtgagcggggagtaggcttatccggtggccaaaaacaacgtatttcattggcacgggctttggcgaaagatccatcgatcttgattcttgatgataccacttcagcggttgacatggagacagaatccaagatccaacaagagctaaccaaactaactggagaaaaaacgactttcatcattgctcatcggatctcttctgtccgtgaagcagatcaaattctgatgatggaaaaaggacgcgtgatcgagcagggaacccacgaagaactagttgccaaaaaaggcagatacttcgaggtataccaaaaacaattgggattgactggaggtgacgacaatggcgcgcaataaatttgatgtggatgaagaactggaacaggagttcagttggaaagactttaaacgattggcccgctatgtcgtcccttataaagcgagtatcggtaaagttctctttacgatcatcttagccaatttggcgggaatgcttgctccggtatttacaaaaattgcgatcgattcagctattcctgaccagaataaaatgcagctgtttttgatcggtgctgcgtttgttgtgacactgctgatcattggactgtgcatgcgttaccggatttatcatattacgaatattggccaagacgtcttgaaagacatgcgttacgatatctttgaacatttacagcgcttgcctttttcctattttgatacgcggcctcatggaaagattttgatccgtgtggtcaactatatcaatacactgagcgatctattaagcaatggactgatcaatctgatctccgatgttttcaatgtagtgatcacactgattttcatgttagtcatcgacgtcaaactgacattgtattcattggcactcttaccgatcttgttcgtgatggtcatggtgattaaaaataaacagcgcaaagcttatcaagttttaagcaacaaacagtcgaatctaaatgcgtatattcacgaaagtatcgctggtatcaagatcactcaatccttcgcccgtgaagaagaaaatgcccaaatttttgaagaagtcagcaatgattaccgtacatcttggatgaaagctgtcagagtccaatttttgatgtggccaggggtgcaaaacatctctgtgatcactacttgtctgatttactttgttggtattcgtcaaatcggtgttgatgtcagtactggcacgttgattgcttttattagttacatcaataatttttggaatccagtaatcaatatcggaaatttttataattcactgatcacggcaacggcgtaccttgaacggatctttgagacgatggatgaagtaccggatattgaagataaagctgatgcgatagaattgccgagcatcaaaggggaagtggctttcgatcatgtgactttccgttacgaagaaggcaaaaatatcttgtctgatgttaacttccagattcaggcaggagaaagtattgcgttagttggtcctaccggcgcaggtaaaacgacgatcatcaacttgttgagtcggttttatgatgtgaatgaaggcagtgtcaaagttgacggttatgacgttcgggatgtgaccttggaatcattgcgctcacaaatgggtgtcatgctgcaggatacttttattttctcggggacgatcatggaaaatattcgttatggaaatctggcagcaaccgaagaagaaatcatcgaagctgcaaaaatcgttcgagcccacgagtttatcaaggagttgaaagatggttaccacacagttgttgaagagcgaggaagtacgttatccgcagggcaacgccagttaatttcctttgcccgagcattactggcagatccaaagatattgattctagacgaagcaacttcaagtattgatacaaagactgaagagctgctgcaagaagggcttttaaaacttctggaaggcaggacgtccttcattattgcccatcgcctgtcaacgatcaaaaattccgaccgtattttttatgtcgctgggggaaaaattgctgaatcgggcaatcacgaccagctgatggccttaaaagggctctatcatcacttgtaccaatcacagtacgatttgttgcaggcgatatgataaatggtagtaggctttgcgcaaaaaaagacattcgtttatcagcgaatgtcttttttgcttaatgatctgtcaaatcaacgattttcgttccgtggagttcagagacaccaagctgatcggcaattgactgggcattcttgtatgaaatacctgcacctggtaaaataatcaagcggtctcctgcatagtcgatcaatgcttttaaccgttctaagttctcttcgatagctgttcctgctggcccgccatgtgtgaggatgcggtggacgccgtgatcagcaagccaatcaatggcttcaaattggcgagattccggaatggcatcaaatgccatgtgaaaagtgatctgtaatccttcagctgtatcaatcagaagttccagtgcttcctcatcgagccagccgttcggtgtcagacagccaaagaccacaccatcagttcctaatttcttggcttcgatcaaatcggtgtgcatgatttttaactcgatgtcattataaacaaaatcaccgcctcttggtcgaatcattgtcatgatcggtacacttttttcaccagcgtaactcagtgcttcttcaatcacacccgtgctaggtgtggtcccgccgacagccaaattgtcgcataactcgatccgttttgctcctcggccgatcgctaatgggatcttcgtataattttcggcacaaaattcttttaacatctgtttccctccgtttttcagctgttattctatactagcattttaccataagtctatgctaaagtaagaaagagaagagggatttgatatgttaaaaaaaatcgatcgtgggcgactttttcttgaggcccatagcgacttatttgagtgtccattgtgtcatcagcaggtctttgccaatgagagtggactgatttgtctgaatcgtcatcgttttgatctttcaaaaaagggtactttattttttttggatcatcctgtgaaaacggagtatgatcaaggaatgtttgttcctcgaagtcggatgatccaaagtgggatgtatcgtccagtcttagagggcatctcccaccagattgaacaatccgaaaacattttagatattggttgtggggaaggcagctttcttgcccaattattagccggacaagaaaaaacggcagtaggatttgacattgccaaggaaggcatctatttggcaaccaatcatgctgcttctgccttttggtgtgtcgcagatctcacgaatcttccttttgcccccgctagttttgatacgattttgaatttattttcgccttccaattatcaggaattcgaccgcatcttgaagccgggcggacaagtgatcaaagttgtgccagcagcaagctaccttaaagagctgcggcaagctttttatccagatgattctgcaaaacaagtctattctaatgaacgtgtcgttgataaattttttgcaaaatatccgcaagcgagccgagaacggatttgttatccattctcaatcccagaagaccggcgactggacttgttggcgatgtcgccattggagtggggtgcgtcaaaggagcaaatagcaaaagttcgggaaaacccgttacacgaaataacagtcgatattgagttgttagtcgcgaaagtttcttgaaaaatttttgaacttttttgttatttacccttgcaatcatgtcatgggagtgatatattgttcttaagtcatttttcattggtttttatcaggttcctgttctgataaaagttagtgaaaagagcttcactaacgtaacgactcgcagtgattgacaccgagttggtacgtttttttttatgctcaaagtttcagtaaatcagatagaagttcgcaaaacgattttcgttaaaatatggtactatagaatctattgagagacagttggctcgaaccaattgaaaggagtcttaccagatgaatcacattgttttatttgaaccacaaattcctgccaataccggcaatatcgctcggacttgcgcggccaccaatacacatttacacctaattgaaccattaggcttttcaacagatgataagcatttgaagcgtgctggacttgattactggcatgatgttcatattacttatcacaaagatttagcggcatttatgtcctttttaggtgatcgtccactgtacctgatctctaagtttgccaatcgtgtctattctgaagtagattatacgactcatgaagaccaatttttcctttttgggaaggaaacaactggattgcctgaaacattcatgcgcgaacatgcggacaaatgtttacgaattccaatgaatgatgcccatgtccgatcattgaatttatctaacactgccgcgttgattatttatgaagctttacggcaacaagggtttccagagctagaattgactcatcactacgacaatgacaaattagattagatacaatcgataggagagacttgttcgatgcaattatattttactcgtcatggcaaaacagaatggaatcaagcacgacgatttcaaggaatgatgggcgattcaccattgttgcctgaaagttataaggagatccagcttttgggagacgcaatcgcaaatgttccttttgaaaaaatctattcaagtacctcgttacgtgcccgtacaaccgcacaagggatagtggaaagattaaagcaaccagtcgagattgtttatacagaaggattacgtgaacttggactaggcgatttagaagggcagttcattgatgaaatgcaggcaaaatacccgcaagagctggctgatttgcgccaccatcttgaccgttatgacccaacgatatttcaaggagagcccatcgaagatgccctgaagcgcattgaaacagtggtgatgactgctgtgcaagcccacaatggtccgttactttttgtcggtcatggggcctcattgacggcagctatccaatggttggccggaaaagaattggcacaattgcgggaacaaggtggtcttgttaataatagcttgaccattttagagacaggagcagataaacaattgccttttgagatgacctgttggaatgatgcaagttttctagaaaatcaagacagtttagatgccttactataggtgaaaggagcggcgtcgtgaatccagaaagaacattttttgtcggccatgttgccgcgatcttttttcaaaatcctagcaatttctataaggtacttttagtcaaagtgacagaaaataatgcggattacaaagaatctgagatcgtcgtcactgggagctttggtgagatccaagaagaggagagttaccgattctacggtgagttagtcaatcatcctaaatatggcgtccaattaaaagtggacagctatcagcaagaacaacctacatcagagcaaggtctgatcaattatctttcaggagagaagtttcctggtatcggtaagaagacggctgaaaaaattgtggggcttctaggagatcaggcgatcgatcgcatgttagaggacccggtattgttggagcaaattcctggattgaatgaaagcaagcgaaaaatgattcttgatacggttcgactcaatcatgggatggatcaagtgatcgttgggttaagccgctatggatttggtagtcagctttcttttgccatttaccaagcatacaaaaatgaagcattagagatcatccaagaaaatccttatcaattagtcgaagatattgaagggattggcttcaaacgggcagataacatcgccgatcaattaggaattgaagccacctcgccccagcgctatcgtgcggcagttttgcaccagatttttgcccaatctttacagactgggaacacgtatattcacgcacaagatttgcttgagcaaacacttcggttgttggaaacgagtcgacccatcgaaattccaccggatgacttggcaaatacgattattggattggtagaagaaggcaagatccaacaagaagaaacgaagttgtatgaaaacagtctctatttttcagagtgggggatcgccaattcgatccaacgattattagctcgcaaaaaagaaatcaactaccccaaaaaaacagttgaaaaaacactccgaaaaatcgagaagcgattagggatcgtctatggatcttcccaagaagaagccatcaaagaagccatccattccccattatttattttgactggcggacctggaacagggaaaacgacagtaatcaatgggatcgttcaattatttgctgaattgaatgatcttgatttagatcccgcaaaatacacggaagaaatgttccccatcttgttggcagctcctacaggtagggcagccaaacggatgaatgagacgacgggacttcccagtgggacgattcatcgtttgcttgggcttaacggccgtgagaagacgcctagtgtcgctgcgaaagaacttgaaggcggtttgttgattgttgatgaaatgtcgatggtggatacgtggttggctaatacattgttcaaatcgatccctacaaatatgcaagttatttttgttggcgacaaagaccaactgccttcagtaggaccgggacaagtgctgcatgatcttttagaaatcgaacagattccaaaacaagaattgaccgagatctatcgtcaaggagatgggtcaagcatcattccattggctcatgcgataaaaaatgggcaactgcctgcagactttacccaaaatcaaagagatcgctctttctttgcttgtgatgcttacaaaattgaaccgttgatcgcacaaatcgtgcaacgggcgaaagcgaaaggcttcacaccgcaagacattcaagttctagcgccaatgtaccgcggagcagcagggatcgatgcactaaacaagatgatgcaggaaatctttaatccaaacgatgggaccaaaaaagaagtcacttggaatgaaacagtctaccggatcggagataaagttttgcagctggtcaattcgccagaagacaatgttttcaatggggatatgggacaaatcgtcggcattattcctgccaaacagtcagaagacaaagtggacgaattagtgatccaattcgatgccacagaagttacctataagcgaaatgaatggaataaaatcacattatcctattgctgctcgatccataaagcgcaaggaagcgagttcaaaatggtgatcatgccgatggttcatcaataccaacgaatgctgcaacgaaatttactctatacggcagtgacccgcagcaaagagctgttgattttattaggagaaccccaagcttatcaaacatgtgtgacacatgagtccgccactcgactgactaccttgcaagagcggatcaacggcagcgacgagatgacacctttgcaacgtcaaaggttggcacagtttgaagaagcagatgatcctttctcagagtctaactcacagacaacagccacaatgaaaagtgaaaagaaaacagatactgcccgtgagccggtgagcagtaagcagtcggttcagaaacaggaacttgatttgtttgccacaacaccgagtgaatccatcatcgaagaaacactaccggaaggaactatctcaaaagaaccgctttcgagagaattgacaatcgaaatggttcaaaaaaatgtggttgatccaatgattgggatggaaaatctttctccatatgattttctcgtctcttaaaaaagaattttttacagttaatgaaaatgagcgctttcttttggttttttagcgaaacatgctaagctaataccaaaaggaggcgttttcaaatggcgaaagaaacagatgacaaattagaaaaattagcaaaagaatccagcaataacttcaagaaattggatgagttggagaaagaatacaaacttgatgaaagtccagatgccgaaaacgagcaaggagaggaaaccgagttagagaaaaaattagacaaagttccgccagtttgggcaccaaacacaaatccgactaacccaaccaatccgaatagttcaggaagcatttaaggctgaaatcaaaaaaacgcgtaagaggagattgcctcttacgtgttttttattgtaaatgctggtaataataaatggctaactgggtacgatcccgaagttctaatttttctaataacttactgatataattgcggaccgttccttcgctgagaaacaacgcttgcgcaatttctttattgttttttccagtggcaatttccttcaagatcattttttctcgttctgagaaatgagtagtcaaataagagtcattattttttaacagtgtaggaaacttcgtgacgatttcagcgccaaacactgcttggccattgtatgcagctttgatagagggtacaatagccgaaagattttgcttgatgagatagcctttgactccgagatccaaagcttctcgtatataggcatcatcatcaaaagtagttaagagtaaaatgacggcattcggatcccgggttaaaatcttgcgagcagcatctaatccagtcccatcgggcatccgaatatctgttagtataatcgcaggttttctttcttcgtacaatgcaactgcttctttggcacaatgaccaatgcctgttacctcaatttcgtttgaaacttccaagatggtttttaatgatgcggtaactaggggatcgtcatcgatgattactacttggatcattggtcctcctccttaggtaaaataatcgtaagttgaaataaattctctttttcaagggcatggagttgtccgtttacctggttgattcgctggcgcatcgtctgaaaaccgatcccgtgggtgtgattgagcctatcctttggtttgtcattcttgatttgtaatcgatgaaaagcaggtagttgtttaaaatcgcaagtcacttttgttgcttgactgtgcttcatgacgttggtcaaggcttcttttatgatcgtgattaggacagtttgttgtgtttgagagagaatacttggcggtgttcctattacctcaactgtacaaaattgaaagtctgatagcaaaagatctaatgcttgtggaaaaagaagcgagtgatgatgtaaatcgtgaacactttctcggatgcggtccatacccaagttcatggttcggttcaattgatccaatggtaagtgaagttgcttattttgattaattgcttgaatggcacctaattgtaagatggcacttgaaagcagatgaccaacattatcatggatatcacgagcgattcgattccgctcttcagcgatctgtaaggcgacttctgtttcttgagagcttttaaggtagtcgttttgctcacgcaatcggctctcattttcccaattggcatcttgagtcgagttgaattttttttgtaacgaatgaaattcaaaactatcgtttcgcaagtaagaagcagagtagaccaaaagcatcagtataatccgtatcggccaagaaggaaccaaggaaaataagagtatacaaagaatgagcaggaggatcttttcttgcttttcaccaatctgggctgaacgaaagacgcatgggaaaaaatagctataaattggccaaaccaaactaagacctatcaaaatgcccaatgccagccacgttccttttttgaatagcagacagagaccacttaagatgattgttgtcaaaagatagattaagtctagggcttggaagccattcagggacattagccctccacagagaagaaaataaaaaacaacctcattaatcgacaatggtttattcatatctggctcctaaataatgacaaatgtcatttttgttttggcgtatcctcactagttattcttttcgctttttattatagtcagaataagaagtgtttggaaaggagttttttcgatgattattgaaattgataacttggtaaaacgttatggtgattttctcgcattgaatcattttaatttgcaagtcagggaaggtgaagttctcgggcttttaggacctaatggaagcggcaaatcaacagctatcaactgtatgttgtccttattatcttttgataaagggactattaaattgtttggggaaaaaatgtcaccgacaagttatgaaataaagcaaaaaattggcgtcgttccgcaagatatcgctgtatttgaagagttgactgtctacgacaatgttgattacttctgtggtctgtatgttgctgacaagaagaagcggaaactattgatcgaggaagtcatttcgcttgtgggattagaagagttcaaaggattctatccaaaacaattaagtggtggcttgaaacggcgtttaaacattgcttgcggcattgcccataaaccacaactgatttttcttgatgaaccaactgttgccgtggatccccaaagtcggaacaaaattttggacagtatcaaaaagttgaatcagcaaggtgcaacaattgtttatacgactcattatatggaggaagtcgaaatactttgtgatcagattgtgatcatggatcagggacaagtcatcgcgaaaggaacaaaagaagagttgaaggacatggttcgaagtacggaaaatcttgtgattgatatccctttacttccagatacagcgatcgaatttatcaagtcattgcctcaagttcttgaaactgcctatgataaagagcgtttgacgatcacagccaaaaagatgaaagagattcttttaccagtactaagctatttggaggatgaacatatcgcatttactaagattcacacaggagaagcaacattaaacgatgtgtttctggaaattaccggtaaagaattaagagactaggagggagattatgtttggacacttatatcggtatcgcttgaacgttttagttcgtaataattccttactattttggacattgatcttcccgattttattagggttgatgttttctgtagcatttagcgagattgatcaagctggaacgatcgagacgattcccgttgggattatcaaagaagaacaaaatcagaaaacaaatgagggacaactgactcagcaagacgcatttatgaatgttttgaagcaaacaaaatctggtggagaaccattgttttcactacaagaagtctctcctcaagaggctgaaaaacgattagatgcaggggatcttgctggatattattcctttgaacagtcatcgatccaattggctattgcacgtaccggtctttctcaaaccattctaaaaaacatgatggaccgatttttacaaaatactgacctggccaataagttggtggcaattgactctactttgacagaagaccagctcacatcttttctagttggagaatcttttgttcagcaagaaaatcagactagaaacatgagtatcaaaagtttttatttctttaccttggtgggaatggctattttgtatggattcatgtggggggtcagaaacgcccaagaccagcaagcaaatcagtcttccaaagggattcgcctttcgatcatccctcgaaaccggttgctggttttttcagcaaatatccttgctggattcacgatatttttcttagaagttttagtgattctaagtgtttttcattttatttatcaagtcgacttcggaaaccgctggcagtggttattcgtcctatccgctttgggtgcattgaatgcattattattagggaatttggttgggaatttgcttcctaatatggggctggcacaaaaagaaggattgggtgtggctgttacaatggcgatgagtttttttgctggtatgatgggctcccaagacatcaaatacttgatcgatctgcacattccggtgctaggaaaactgaatcttgtcaacttaattagtgagagtttctatcagctctatttttatcgctcactagaggatttctatttgaatcttttctggttagtagcctttatggttatcttagcctttagtaatctaatgtttgaaaggagggttcaatatgtcgctgtataaagccgttttgaaaattttaaaagcgaacaaaacaaatttgttgattgcagtcattgtaactgtgatcatcaccttcttctatgcgcaaaatacagcagcaccggatgcaaaattggatcgggggacaatgaccattgttacagaagacaactccgcattaagtaaagcactgattgactatttaaaagaagaacaaacggttgtggaattgtctgataagagccaaaaatcgattgatgatgcgctgtattttggaaaaatcgactatgttttatttttgcctaaagattttactacgaatattgaagcaggtgtaccgtcagcaatcgatgcacaatctcgtcccgatgcttttgctaaaacattgattgaagggcaagtagatacctttttgtcgacttatacggctttttatcatgtaactggcaatagggaagaggcattgaaaaatacgcaatctactttggccgcaaatggcgaagtaacgattagtcgtggatacagtgaacggatgaaccagcaattcggcagcttagtattcaatgcacttgcttacggtttgtttctttctatttttagtggctatggcgtggtcaatctagtgttcaatcggaaagaaatccggaatcgcaatcaagtatctcctttatcaacacggcggttgaaccgagccgtttctattggtatgttggggtattcactgcttctgactagttgttttacagcgggattactcctatttactcgtagcacgtggtccgtcatgaccggctatctagtgattaatcttttgtgttttttcttgccgattgtcacattttcaacgtgtattacgtcatttgtcaaaaatagtgaggcgttgaatggaatttcgaatgtgtatattatgggaagctgttttttagggggagtttttgtttcatcagattttttaccagactttattagtaagatcgcttcttttacaccgacttattggtttgtacaaaacaatcaattgattgggaacaccctctctgtgaatgcggatttcattacgaaattctggttgaactgcttgatattggtcttatttgcctgtgcctttttgataatacagttcgttttgaaaaaagacagccgctggtttaatcaaaaaagggttgcatgagtcataaaaaaatgatgccgctgactcaacagctgcatcatttttctaatctcactatttctaactccatatcaattgtttggtagtggttatggtgatatcaaatggccgcttacccatttcttcgccgtcttcttgaccatgctgtggtactgtggagacgattcggagcttattcgtagataaatgatggaagtagcgagatctcatttgtttcttgcgggttagtaaggctaaaagccaaaaaattttgaacaaagcgactcgctcaacgagaacgaaatcgatcttatcttcgttgaggtttgctgtaggtgcgatcgccacaccgccaccgaagtaggggtgatttgtcgttgtgcacaagaaagcctttgtaaaattcaattgtttcccattggtttctaccaggatgggaaatcctttttgccggaataagacattcactactgcagacaagtaggcaaatgaacctaaattgaacttgtttaagtttgatttcgcagcagaatgatttgctgcgtaaacgatcgatgcatctaatccaataccgatattgttgattgcgaacccagtttcatcttggatttgatcatgatacttgatgatcgtaaccgattgaggagtagcggtcccagcgattttccaaaatacttgctctggttccttaggtaaacgcattcctctggcaaagtcattccctgatcctgccggaatgtagcctagtggaatatttttttctgattcttgaagggaggaaactacttgatgtaaggtgccatcgccaccgatcaccaccagtaaggggtaaagcatttctgaattttctcgatagatgtcatcccatggcaacaatacttgtgccagtaaagaagtagtaagttcctgttcttgcccggcatattctgtatagtagaactgatggggaaaacgccgcttcttgacgattgcttcaatttttttggctacttttaggccacgtccactgcctgcttcagggttaacaacaaaatgataataatatttcatacaataaatgctccatctaatctaaaatcaatgctgtttattatagcacgattgctgacaagtttggctagtgatgcttaactattttttgacaaaaaaatagattcgacgaaaggtacgtaacaacaagctactattttcgctgttgtttttgtgatctaaggttcttatgtccactatgatcacatccgtattgctcacattcgccgaatcctattcaattagtaaggagtaactcaaattcccacatcctttgtctgtttttctaagttgacaacaattcttttcttgcagatccttcatcgtctgctttactgggaatccttgctccttacacttatagtatagcacgaaaacggatagaagcaaccgcttacatggtctttgtcactatctttagataaatttaaagatatcaaaagacagcactcttgaacttattagccattaagtcgatgaacaatgaaggtgtacgattcccctcataagcaaacaggaacttagaggaaaatgaacaattgaacgattcacagacatcaagtttacatgaagttggtttgacgaataaagagacggatgtccgtctctttgagttctttatccaagtttattcaatatagctgatggaacatcattaggcgagacttcttcccatcccattactcctttatgattatttacatgtaatacaaggtatgcattctcttttagtggcttgtctccataggaattaaaagacacatctttttcattattgtctgatgtatagctagctaagttgtacttgtatctaaagtgttctctcccgctacctctaccaatcgaaacgcgttcacctttcgaagttatcttagtgtagtaatctgtcgttccataagattgctcataccagaaccagcctccacccatcaaagggttactacagtaaaagataatagttttttcatataaaatcattcctttcgaggaatagattacatctatgaataatgaaataaatcaatctaaaggctgagaataagcgaacaaaattgtaaggaggacaatgagaattagtaggagaagaagaacagaatgaattgcgagcaaataaatactcaatgctcgtctttggcctgttttgctggaagattcctattcaaagcagaaccaccgttttaatggttatgtatttaaaatattctagtcatttccggtatcttttttagcctcgctgatagatagatcgttcctctttcttttttgttgattttaacactttgctatttgacaagtgggttgctttagaaggagattgtacgaccttgttactgaagaacagcttgggggaaaataggtttttagactttcatccacaaaacatccacatgaattctccaatttaattggacaatggaaatcaataagaaccaaatcaataatgtaagcttgataaatcagtaatcttctgtataataattatttgtgcgtaacgcatcgcggttcatcaaccatcccgcgtaatcaaaactcggagaaagaagggatcaaatggataaatcatccactttatcaaaccagcggttgcgagttgtcgtcgcgaacggtttgatcatggcactgtatgttgcagtgacagtcttagtcgccccagtggcttctggtgccattcaatttcgtgtctcagaagggctgaatcatctggtagtctttaacagaaaactgatgtggggtgtttttggcggagttgtattgtacaatttattttttggtatgggaattttggacgtcgtctttggtggaggccaaaccttgcttgcattgtcagcaacggcgctattgcagaagaaagttccgaatgtctttgtccgtttagcgcttaatacgattttcttctcgttgagcatggtcttgattgcaatcatgctgcatctgactctcgcattaccattttgggcgacctttggtacaacagcgctaagtgagttgattatcatgacaatcacagcgcctataatgtatatcgtgaatacaggtgttcgcttcgataagcgattttaatcaatcatttgttttttgctttgatggttcccaaaaaacaaataaaaaaagatcatctctaccgtaggttttggtagagatgatcttttttgttattctgcattcaaatcttcaatttcaacaactttgaagttttttgcctctaactgataaatgatcttatcgcacagctcttttgacgtattcgctggtaaagtaattaatgtccgacgaataaattcatccttgccgatgtccaatgtgatacagctggcaatactgctgtatttcgcgatgatttttgaaatgatcgctaaatcgccttgtgtgccagttgatgcgatagtcagcacgtagcttccttgttcgacattccaagattgagacagcatattcaataatgaactgtgggtcaaaatcccatagaactcattgttttcatctaatacggcaatgtatggcaactctttgatcgtgaaaaagactttaaaaaatgaagaattgacataaataaattttgtcgcgtttttaagcaggtgtgtcactggtaatgtcatatctccaccattcgatttgtgacgatagatgtgcattttatagatgtttccccggaagattttgccggattcatctaagatcggtacacagcgatagccagaatcttctaaaatttccaaggcttcttctaaagtagctgtttctttaatcgtagttaagtcgcgttttttgtaaaccattgtttttagtaacataacaattccctcccaaatacccaattcacatctctataataccataaaatcagcggaaactatatttttgcgtgtcaaaatctaaaattgacactttcactgaaaaatggtatttttaactttggaaaactttgtataaagggggaggacatcagaaatggcaacaaaaaaagcagctttggcttgttctgtctgcggatcccgcaactattcgaaatcagtcagtgaaggaaaaaaaggcgatcgccttgaaattaacaaattttgcaaatactgcaatcaatacacgctacatcgtgaaacgaagtaaggaggaatcttgatgaactttatgaaaaatgtttttgctgaaatgaaaaatgtttcttggccatcaagaaagcaattacgcagagatacttttgttgtgatccaaacgacaattatttttgcagtgatgttttttgtgatggatacgctgattcaaactgtttttgatttgattttgaaataaatgctgctggattatcagcaactagtcaagtaaaacaaatcgtggtataattgattcgaggaaaaacttcggtgcaactgaggtttttttattttacaaaaagatagggagaccgaatacaatggaatcttttgaaaaaaattggtatgtcttgcatacttactccggctatgaaaacaaggtgaaagcgaacttggaatcacgggcgcaaagcatggggatgggcgattacatctttcgtgttgtcgtaccagaagaagtcgaaacggaagaaaagaatgggaaaaagaaagagatcgttcacaaaacttttccaggttatgtcctcgtcgaaatggtcatgacggatcaatcatggtatgttgttcgtaatacaccaggagtgactgggtttgtcggctctcatggagcaggaagcaaaccagctccgcttttacaagaagaaatcaactctatcttacgttcaatcggtatgagcactcgaacagttgaattggaagtggagattggtgaaacagttaaaatcatcgaaggtgcattctctggattagaaggacaagtcgctgagatcgacgaagaaaaacaaaaattaaaagtcaatattgatatgtttggtcgagaaacaagtacagaattggattttgaacaagtagataaaatctaagtataaaaatgtagtgttttttgtcaaaataaggtaaaataaaattgaaaattggtgatagcggaccgttattggcccgctgtttttatctcacgaaaagaaagcgttttataaaaaagggggtcctatgaagaaaattctcgcatcgatttgtcaacgccatttttttgaccaacatttggaaaaaagaggtgtgatttccgtacataatggttatagtttgttgtttgcttttaatttgtttttgctgctttctgccgtgatctttatggaacctcaaaaagtgtttcgtgaaatgcttacaatcatgttctcggaaagccatttagtaacggattacgttgcgctgacttctgtaggtggcgcactgttcaatgcgtcgatcatgacttttgttgcgatcgcggtttgttaccattaccgagttccggttactggaggaatgatatcagccgtcttcatggttacggggtatggtttgtttggcaaaaatctgttcaattttattccaatcttcttaggtgttcgtctctattcctatttaatgaatcaacccctcaaaaaatatcttctcattgctttgtacagttcctccgtttcacccatcgttagtttttttgcattcaatgactcacttccagcttatttcggtagcttcatcggttatttgatcggtgttttgactggattgatcatggttcctttagcactgcattttcaagcattatttaaaaaagtcagtatctatagtgccggctttacttctggcatgttgtgtacgatggttgcaggaatttgccgaatgtttggttttgatatcgaattgcgagcaatcgtttctaaaggctccaatcttccactgattattatgatggtgtcgctgtctttattaatgattggctatgggttagcaatggctgttaaacgcaagcggttgaacatgcgggcaatatggtctcatagcggcaaaatcgaatacgatattttacgtgaaagtggcgtttataatacgatgattaatatggggttaatgggattgctgttaatgagttatgtgagtatactaggtgtcaacctcaatggtcccattgcaggtgcgatgttttgtgtcattggtttttctgcttgtggtgcccatgtctttaacgcgctgcccttatttgccggtgtgctattagcaaatacaatgaatatctacgcaatgactgaaacagtaaccgttacagcggctatttttgcaatgatgctctgtgcggtgactaatgcttacgggtggaaaggggggatgatcgtgggattcattcatacgtcgatggttttgaatatcgatgtgcttcatggtggattgaatctgtacaataatggtttttccggagggctcgttgcgatgatgatcattccattgctcgatttttttcacaaatcgcggacacctcgatttttaaacggaagaaacagtccggaggcaaagaaaaggtaacctatcaagcaacgagtaaagaatgaagtgttcttgaataaagagtaaacattagctattgcttgtttcttgtttcaaaagggattatactagacccgatttggagggactgtaaatgaaaaaatggctatttttatgtctggttgttttgcttagcggctgtcaagcagcaactcactcaaatgtttcagcacaaaaaagtacacagaagccaacggagacaacgactgtttcggtagaaacatcaaccaccgaacccgttcagaaaacgaccacgccaacactttttattcatggttatcaaggaggtcccgcatcatttggagggatgatacagcgttttgcccaaaaagattgggtgagcaatgaaatggttctaacaatttcaccagatgggacagtttcaacggaaggagtgctttctaaaaaagctgtaaatccaaccattcaggtcttgttcgctgacaatcaaaataatgaatggaatcaagcagaatggatccgacaagcgttgctttatctgaaaaaggaaggaatagagcaagtaaatttagtcggacattccatggggggagttagtggttttcgctatctcacaacatttggagagctgagtgcagctggggctgaagcactggatcccgcattgccaaaagtagctaaatttatagcgatcggggcgcctttcaatgagtttattgatacgagttcacggcagactatcactgatttagtgacaaacggaccaacggaggcttctccacgctaccaggaatttcaaggactattgaagcaaggggggcatcgactcccgattgagctgattgctgggcaattatctgatgaagagctatcggacggcactgtgccgaccacaagtgccttggcgatcaaccacttattggcagcgaatggctattctgtgactgaaaaaatcattaaaggatcacaggcacagcatagtcagctgcatgaaaatcaagaagtagatgaagatattgctgcttttttatgggagaaataactgatagtcgtcaaaaagctgtaagaataactatgatataagttctatctgttttttttagtagtagcaaatagacaaaaatatccgaatgatcggagatcgcttattcttctcgtacataggtaacgaggacctgcagagccgcgggagctatctaatgatcattcggatatgttattttttgagactcttacatcttttagtgttcagcggcatctaaaatttgcgcttgtagacgttgtgctgtaggcgttgtggccaacccgccctcggctgtttctttaaaaatacttggcatttgccgtcctacttggtacatcgcgtggacgacctcatccggaggaatcacactttcgattcctgataaagccatatcagcagaaataaatgcttgtgaggaaccgagagcatttcgcttcacgcaaggaacttcgactaacccagcgacaggatcacaaatcaatcccatcatattttttagtgtaatggctactgcttgagcagcttgatgtccgctcccacccttagcacagacgagggctgctgctgccatggcactggcagaaccaacctctgcttgacaaccgccttctgctccggatatcgaagcattgttcgcaatgactagtccgaaggctccggcagtaaagaggaaatcgatttgttgagaacgagacagctgcaaacgatcgcgaacagccatcagcacaccagagacaacaccggcactcccagccgtaggagtggcacaaatcaatcccattttggcattgacttcattgacagcaatggcattttgaacggcttgcaagatcgtctcaccacttagaaaatcaccagcctgtatataatcattcattcgtgtggcatcgccaccggttaatcccgtcacagaggtcactccagcaacgccctcggcaacggattgttccatgaccgtcaggtttttgtccattagtgcaatgacttgctcgcgagtgcgccctgagttttcgcattcgaccgcaatcatcatctctgcaatcgatgcataatttttgctttgaagaacaagatcttcaatcgtataaaacatgacgaatcctcctttaatcgaaataagccgcactataaacgtggggcagtgctttgatttgttgtgccaattgatcatttcgttcatccacttcaatgatcataatggctttttctcctttggactctcgggtaacagtcatcgtaccaatattgatttgtgcctcagaaagtagattcgtgacacgtgcgatcattccgggaacatcttgatgaacgatgacataggtaggggtacctaaagtcaatgagattttaaaaccattcaattcagaaatttgtatattcccaccgccgattgaaatgccggtaacggacattttgcggtcacctttttttaaaatcattttgaccatattcggatgttcggctttttcgtttttcggaacaaagagtacttctagaccttgctcataggctaactttaatgagtcagcaaggcgctgatcatcgggctccattcctaacaaaccgccgacaagtgcaatatctgttccgtggccgcgataagttttcgcgaaggactcatacaaaaggatatcgacactgtcaggctgttcgccaaagatgtggcgcacgattttgccaattcgagcagcacctgcggtatgggaactgctgggtccaaccataattggtccaataatatcaaagacacttcggtattttaaaggttccattctattcacctcatttaattgatgggagaaatccagatgtagtttagcataaaatatggagaaatagagcaatgagtggaactgtatgggatttttttaatcttttttttgttttaccgattttctccataaaaagcaaaaaaattcgctaagagttcttgcaaatttcttttgagatgctataatatctcagtgtgcattattcacacgttttttgtgtgcgcacatgattcactaaagtgggaggagaaatatggatctccaattaaccacatcacggactcaaggaggtatgtctcgtggcaaaaaaagtagaaaaaatcgttaaattgcaaattcctgcaggtaaagcaacaccagctccgccagtaggtcctgcactaggtcaagcgggtatcaatatcatgggattcacaaaagaattcaatgcacgtacagctgatcaagcaggcttgatcattccagtagtgatctctgtatacgaagaccgttcattcacattcgttacaaaaacaccaccagcagcagtattgttgaaaaaagcagcaaacgttgaaaaaggttcaggcgaaccaaacaaaaacaaagttgcaaaagtttcacgcgatcaagtaaaagaaatcgctgaattgaaaatggaagacctaaacgcagctgacgttgaagcagctatgcgcatggttgaaggaactgcacgaagcatggggatcactgtagaataatttttacagaccctaaggaagtagcttctcagtcggctctatattgaaaaatatgggacacgtgggaggttctaccgttataaccacatcaaggaggaaacaaaatggctaaaaaaagcaaaaaaatgcaagaagcattgaaaaaagttgacgctgcaaaagcttattcagttgaagaagcagtagctttggcaaaagaaacaaatattgcaaaattcgacgcaacggttgaagttgcttacaaactaaatgtcgatcctaaaaaagcggaccaacaaatccgtggtgcggtcgtactaccaaacggtactggtaaaacacaaacagtgttagtttttgcgaaaggtgaaaaagccaaagaagcagaagcagctggtgctgatttcgttggagacgatgacatggttcaaaaaatccaaggcggatggttcgattttgatgttgttgttgcaacaccagatatgatggcaactgtcggtaaacttggtcgtgttttaggtcctaaaggtttaatgccaaaccctaaaactggtacagttacaatggacgtaacaaaagctgttaacgaagtaaaagctggtaaagtgacttaccgtgttgacaaagctggtaacgttcatgtaccaatcggtaaagtttcatttgaagatgacaaattagttgaaaacttcaaaacaatccacgaaactttagtaaaagctaaaccatctgcagcgaaaggtcaatacatgaaaaacatttctgtaacgacaactttcggacctggtatccatgtagatcaagcttctttctaatttgaataaaaaacaaaacttttgttgacttgactgccttatctatggtaaggtagtcaaggttaaaagtttaactgtaccgaagacagtaggtgacgtcagtcttaatttcctaccgaggacgtttattgagaaacttcaatagtccctctatgtctacggtggcatagagtttttttgtttttatctcttgataaagacaaatgaagacagaaatgttttcttgaaactcttccatcaaaatcaggaggtgaaatttaaaatgagtgaagcagctatcgctaaaaaagccgcaattgtggatgaagtgagtgaaaaattcaaagcagccgcatctgtagtagtcgttgactaccgtggattgactgttgacgaagtaactcgtctacgtaaacaattacgcgacgcaaacgttgaaatgaaagttatcaaaaattctatcctttcacgtgctgctgaacaagctggtctagaaggtcttggtgaagtattcactggcccaactgctgtagcgttcagtaacgaagacgttgtcgcacctgcaaaaatcatgaacgattttgctaaagaggctaaagcattagaaatcaaaggcggtatcatcgaaggcaaagtttcttctttggaagaaatcacagcattggcaaaattgccaaaccgcgaaggacttctttcaatgttgctatctgtgctacaagcacctatccgcaacgtggcttacgctgtcaaagcagtggccgaaaaagaagaagatgcagcataattgccgcataatcacactataaactaaactatctaattaaatggaggaaaacaaaatggcattgaacattgaaaacattgtcgaagagctaaaaggcgcgacaatcttagaattaaacgacttaattaaagctatcgaagaagaatttggcgtatctgctgctgctcctgtagctgtagctggtggagctggcgacgctggtgctgctgaagaacaaactgaattcactgtagaattgactgcagctggcgaccaaaaagttaaagttatcaaagcagttcgtgaagcaactggtttaggcttgaaagaagctaaagctgtagttgacggagctccttcagcagttaaagaaggcatctctaaagacgaagctgaagcattgaaagctgctttagaagaagttggcgcttcagtaacagttaaataatcatttttgatttttttgagctagaattccttttaagtaagggttctagctctttttttgtttatgattctaatttcagtttgagaaaatgacgctgtcttactattagtgatccgtatttttgttgaggcgtcgaggactttttataaaaaaacaagcctaagactagcgctgagcgccgctgacttaggcttgtttattttttgcgaaattgctgaacaagaaaaatgaagataaaaaagaataatgcttcccataaagtagttgtccaactaaaggtacgactgatcccaaaaaaaagattcccaatattggatacgaccaaatagatgaccgtagcaatcaatgaaaaaattaagcgttttgccatcataattcccccttgcctttgattgtaacaattgactgacgagagagcaattattttaagaaaaggctcctgtcaaaacgaaaaaaagatgcgccattctttaattgttttgggtgctttcaggcgtgagagcaaagaggggagctctataaatttttttgattttcccaatcagttcattgattaatcaagaggaacatcaaaaatccagccagctggagccttgcgctcaccaaattggatacccgtcaattcatcgtatagcgcacgagttttaggaccgacctccgtttcactgtaaaacacatggaaagactctccattttggattccgccaataggtgaaataaccgcagcggttccacaagcgcctgcttcaacaaagcgatccagttgatccacatacacatctccttcgacaggtgttaatcctaaagcatgttctgcaagataaaggagagaatatttggtgatactaggcaaaattgatggcgattttggtgtcacgaattcattttcggccgtgatcccaaagaagttagcggaccccacttcctcaatttttgtatgtgtttcagggtctaaataaatgcaatctgaaaaattccgttcatgggcttcgtatcctggtaataagctggcagcataatttccgcctacttttgcagcgccggtaccatttggtgctgcacggtcataatctgaaacaataaagttcgttggggccagctcgcctttgaaatatgatccgaccggcatgcaaaaaataataaacaagtattctggcgcaggtgcaacgccgatattctcgcctacaccaatcaatagcggccgtaaatatagagtagccccggtaccgtaaggcggtacaaattcttggtttgctttgaccacttgattgaccgcatcgaggaacatctcttcgggaacgaacggcatacgcaagcgacgagcgcttcgattcaatcgtttactattctcatctggacgaaacaagttgatcccgccatctggtcgtcgatacgccttcaagccttcaaagcattgttgaccgtaatgcaatgctggagaaccttcatgaatatgcagaatattatcttcagtcaatgctccttgttcccaagagccatttttccattttgcgacaaagcgccaaggggttttaatatacgaaaaccctaaattttcccaatcgatttgcatagagtcacttccttttttaatttttcctagtatagcatggaacgcccatcaagtcattattttctgaaaattcatcgcaatgattttcatttctaacatcatgatgaaagcttattactagaggctttatattcacagaattttttttcaagcctatctggagctctgcagttgttgataaaaagggggaaggattttggcagaacgtcgagcactttagattgtatttacggaacagatatgcttcaataagggtagaaaaaaatcgattaggaggactttcggtgatcaaagaagcggtttctgaaatccaaggtgtcctggatgcttatcagcgactggcaccaatcatgatccatacacctgccgcaccaagcaatattcttagcgcagaaaaggcaggagaaatttatctgaaactagagaatctgcagcgtacaggatcctttaaggcgcgaggggcctacaacaaattagcaacattgacagaggaagaggaaaaaagaggggtaattgcttgttcagcaggtaatcatgcgcaaggtgttgcactagcaggcgccctgctagggatacatgtacggatctttatgccgcttcaagcagcgaagacaaaaatagaagcaacgagaaattatggcgctgaagtgatcttagcaggagagacattcgacgatacaaaacaaattactttggaagcgatgtcacgtagcggtgaggtctttgtctccccctttgatgatcgagcggtaatggaagggcaaggaacgattgggatagagattttacaagatttgcctaatgtggataatgtcatcgtaccgatcggtggaggcggcttgatcgcaggcattgcgttagcaatcaaacaattacgctcggaaactaatattattggtgttcaatcttatcaagtgcatgggatgatttcctctatatggcgacaagaactgatagccaatcgcagcagtaagacattggcagatgggtgcgatgtggctttggctggagaattgacttatgaaacgttgcgctcgcgcatagatgaaaccgttttagttgaagagaaagatatcgaaactgccatccattatttggctttaaaagaaaaagtgattgctgaaggggcaggtgctctgagtacggctgctatcctaagcggacaaatcgatcatttgctgaaaggcaaacgaacagtcgcaatcgtttcaggcgggaatatcgatttctctgtttttaaagaaatcatttaaaaaaagatgatctcagaccaactagtcgtctgaagatcatcttttttagtccgttttcgatccagttttcagaggagaagaaacgtttactaaaaactgcgaccgccgccgccaaatgttccgccgccggaagaatgagtagtggtgccaccgccaaaaccgccgccgccattatttttaggtggacgtgggattcggcgagtcgttacgaaggagttgaccagacgatcttctttttgagtcaatttgatgctggatttttcttggtaagggtatttgtatccacccatttttaattggtatcttgatttgacaatgatgaaaaaagcaatactgatcactgcagctaccaataagctaatgccgatttctaaaggggtcagcactttataataagtgatcttgcctgtctcacgatccacatgatagtgaccgccgggaacccccgcttctacatagctggctgcattctccaagtagacccgggcggcttgatagtaattacccgccgtcatctgatcataaatattatccaacatatcatcaagacgagcgtcgttgatataatcgagcatatttcctgaggtggaaacatgaagattacggttgcccatatcgatcatcaatgccgagccattctgatcatttccgatgcgatcggcgagaaaacggtcggtggtatattcaatatcgtcaattttgttatttgtcgttgcgataaaaacttcacctttgattttctcattcaactgatcggcttgttcgctcaaactctggatttcggagggagtaaaaagaccagcgttatcagtaacggtattttctgctgccacgctagtgaccgtcgtcagtagaaatccggcaaccattaggaaaaaacaggaaaattttctcataggaaatatcctccaatcatccctagaatcgcaatcacagcaaaaatcgctgcactcgtaaatcctaagcgtttgtaactgatgggcaagacaccgctgactttaccggtttggccattcatcgcataataaaaaacattcttattcggatcatctgcccgataagtgaccagccagactggtagtaggacgtaatgattggtttctttcgtgatctcaatgtcccgctgggtccgattgaagcttgtataaccattaacggtactgcttaggagattttcagcataaccggaaagttcctgttgtacttcattcttaagtgcttgatactcaatgtcgcgtttttctgcttgaaatcctgccagatactggctgcgaaagtcaacggccttatccaatgggaaaggctggaccccggtaaccattttttgttggacattcttggataaagcgtttttgatcagttcattgatacgcatttttccgcgtctggaaacagcaaattgtttgtgttctgtatattcgatctcgccgacacgccaaattcttaaagaagttccagttccagatagttggccatctagttcggcatcgatcctccagtaggggaaataaacaccggtcaatttttcaacttgcgcttgatcgaagaagtctcttggtacgaaccattttttttgtgcccattccagaaatttagcggttgcttcttctttttcgattgcaaaaggtaaaactttgttaggtaagaattctccagaaagacggccggaaaggacgactggattgtggcagaaataacagtaagtagctgctgtcgtagcatcagtgacgatctctgcgccgcagttaggacaaaggaacaagtccatttgggccgccttttcttcggttttttctgtgatagcttcttttagcgccggttccgtatcatcagtgatcggctgattttccggcgcagtcccatctgcaagttgggcttctttttgtttttgttcaaaggctgttacttctgcttctgtaaaaatactcaaacagaaggagcagtggaatttttgatcaccaggatcaaaggttagcgcaccgccgcagttggggcatttatgcgtaatgacatccatttaagttcctccttcatttagtctaaaggaactcccttaaatggcttgccgcagttgggacagaatttcggaattccatttgctaaatcaattatttcactacattctgaacatttcatttgtaaacttggggttcctgtaggttttgctgtaccgcaattgctgcagaacttacccgtattgcttgttccacactgagggcagtcccaactatcgccattgttttgtttctgctgattttcttggttttgctggatttgttgctgattgttttgagctgcttgattcaagtaaccgccagttgtgttcatccccatgcccataccaacaaatccggttgttgcaccggcagcattactacctgcggattccatcccacgtgcgatcgaaccttgaacatacccttcacgaacatttgggtcacccaacatggcaccttgattacgcatgttgatcagtttcactgaatcatccgtataagagatgcttgcaacagcgactgaaacgatttccattcctcgcagttcgcgccaactttcgtctaaaacctcacccatgtatttgcttaattccatactttttgatggaacataggagatgcgctcgccatccgctgacattttgttgatggctgtctgtaaagcagtcagaaactctgctaaatattgttcgttaatgtcattgatgtcaacttgtgttttattttttggaatcgcgttggtgtagaataagatcggatcagtaattcgcaatgagtaatttccatgggctcttaggaataattctgcattataaaagttgtcaaaataatttaatggagaagaagtcccgaagcggattcctttgatttcttgcaaattgatatagaaaacttgttgtttttgaggtgttacgccaccaaatttgaagcgattaaacgtttcagagatggcatcctttaaggaaccgttgaacatggaaggagccaagtcatttttgacagtatagtagccttcctctgctgtataatcaatgatttttccaccatcgaccagcagcatcatcatattagggtagacgtggattacagatccatctgttatgacatcctccgttccttttcggttcgaaccgcgtttgtcattgcgccgtaccttcacacctttagtcatcactgtcgtgtcgcccatattgtcaggttcgaagacctctagccattggtcggcaagacctccgccaatcgtgcttgttgcagctttgataatacccattttcagtcctccttacaaattttcatcatccaatggatgaatgtacattcattataccatagctccgtattttctatgtattagaccaaagttgtagaagtgtaggcaaaagttgaataaaaaatcgtctataaaacaatacttttttcaaagtatcgttctctaggatgtgcggatttttattaaaagattgctcccttaaaaaatcatttctttttcagcagataggcaactcaaggtagttttttttgtaaatattacgtataatagataatagcgaattttgaaaagagtgaggaaaaatatggcctatcaagcattgtaccgtgtatggcgatcccaacggttcgaggatgtcgttggacaaaaagcaattacgcaaaccttgaaaaatgcgatcgagcaaaatcaaatttcgcatgcttatttatttaccggtcctcggggaacaggaaaaacgagtgctgccaaaatctttgcaaaagcaatcaattgtccaaaccaagtcaatggagagccctgcaatgaatgcgagatgtgccgttcgatcacagctggtacgcaagaagacgttatcgaaatcgacgcagccagcaacaatggggtcgaagagatccgctttatccgagaccgtgcaaattatgcaccaacacaagctgaatataaagtatatatcgtggatgaagttcatatgttgtcgaccggcgccttcaacgcgttactgaagacgttagaagaaccacgaaaaaatgtagtgtttattttggcgacgacagagccgcacaagattcctgcaacgatcatttctcgaacgcaacgatttgattttaagcgaatcaatacgcaagatatcgttgatcatctaaagacagttttagacggcagtcaaattgcctatgaagaagaagccttgcaagtgatcgcacgagccgcagaaggtgggatgcgggatgcgttaagtatcgctgaccaagctattgcctttagtgatggcaaagtcacgactcaagacgcattagaagtaaccggcagtttgtcttatgagatgatggaccgtttgatgcaattttgcgaagaccaagcagtaccagatgcattagagacattgcgccagctgctgtcttcgggcaaagaagcacggcggttgttggagaacttgctggtctattgtcgtgacttgctcttatatcagcaggcaccacaattattagaagaaaaatcactgcagatcacaccaggcttcaaaactttagctcaggcagctactgcagatcaaatctaccattggatcactgttttgaatgagacgcaaaacgaggtgcgatttaccaataatccgaccatttatttggaagtagcagttgttaaactagcaaatcagaggagattgccagcttcaggagaagtttcggtgtcgaatcaagaagttcagcagcttcgtcaagaaattcagaagctgcagtcagaagtacgaaaactacaagaaaacccatcggcggccagcagtgaaccggtcaatccacctgccaagaagaccaaaaatagcagcactttccgagtgccgaaagaacgggtctttcaagtcttgaaagaagccacaaaaaaagatctcgcaaatgtgcggaacatttgggatgatctgttgatgtcattgtcggtgacacaacgagcaatgctccacgcgagcgaagcaaaagcagccagtgcatctggtgtagtgattgcctttgattatgagattgtctgtcaacgagcagccaatgaccaagacttgcagctgacattgcataatcaaatttcacgaatgatatctgattatgcaccgcaagccgtgtttatcacgaaagaaagctggccaatcttacgacaagaatttattgctggcggacaaaccttcaatacaggcgaattagatgaaggggaagctgaaccagaaccaactacggaagaacctgaaaatgaagtcgtcgttaccaaagcccaagagctttttggtgaattggcgagcatcgaagaaaattgagagaattggagtgaagaacaatgatgcgaggcatgggaaatatgcaaggcatgatgaagcaagtacaaaaaatgcaaaaagagatggtaaaagaacaagaagccctaaacagtaaagaatttatcggcgagtcaacaaatggctatgtgaaggcaacttttacaggtgataaaaaattacgcgatctttcgatcgatcaagcaatcgtcgatccggaagatgttgacatgttacaagatatgctgatcttggcagtaaatgatggattaactaaaattgaaaaagaaaccgaacggactatgggtaaatacactaaaggaatccccggtttataaaaggagaaatgtggcgtgcagtatccagaaccgatcgcacgattaatcgacagctacatgaagctgccaggtatcggacaaaaaacagcaactagattggctttttatacgatcgatatgaaagatgaagtcgtcaatgagtttgctaaatcactgttgagcgtcaaacgtgatctgcatttttgcagtatttgcggaaacattacagaaggagatccctgtgagatctgcagtgacccttcacgagataaaggcacgatcttagtagtagaagaaccaaaggatgtcatggcgttagaaaaagtccgtgagtaccatgggctctatcatgttttgcatggtgttctgtctccaatggaaggtactggaccagaagatatcaatattgctcctttgattcagcgtctgcatgatgaccaagtgaaagaagtgatcattgctacgaacgccacgacagaaggtgaagctaccgcgatctatctttcccgactgatcaaaccagcggggatcaaagtgacgcggttggctcacggtttatctgtcggcagcgatattgaatatgcggacgaagtgacattgcttaaagcagtggaaggaagacgtgaattataagaaattggaggcaacaagggtgagtggactgttcataaccattgaaggaccagatggcgctggcaaaaccagtgttttagaagaattatatcctcgtttgcagctagaagccaaacgagacattgttaaaacgagagaaccaggcggtgtaaaaatcgcagaaaaaattcggcggatcatactggatcccaaaaattctgagatggatgaacggactgaagcattgctgtatgctgctgcaagacgccaacatttgatccaagtgattttaccagcattgaatgaaggaaaaatcgtgatctgtgatcgatttgtagatagttctttagcttatcaaggggcagggcgccggatcggtattcctgagattgcacgtatcaatgaatttgccaccgaaggcacggagcctgacttcactttgtatttggatgtcgattcggatacaggtttaagaaggattcaagagcatcgggctcatcagttggatcgcttggacgcggaaggattagaatttcaccaacgagttcgtcatgcttatttgaagctggcagaagaaaatcctgtacgcatccataaggttgatgctagaatgggattacaagatgtcgttgagacaagtttttcagcaatcgttgaagcatatccttcctacttcaaaacaatgtgatcgctgacgacaataataaggagatgatctcatgaaattgattatggcaatcgtgcaagacaaagacagcaaccgattagcaaatgaattcattgatgccaacattcgcgctacgaaactttcatctaccggcggattcttaaaagccggcaacagtacatttattattggtcttgaggatgagcgggtccaagacgcattggaactgatcaagaaaacctgtcagtctagaaaacaatatgtttccacaccaatgtcgttagacatctcacttgatgggcaagtaccttatccagtggaagtagaagttggcggtgcaacggtttttgttctaccagtcgatggcttccatcaatactaaaaaggagcagaccatggaggaactttttttacaagaatatcaacctctggtttttgcccaactgaagaaaagtgtcgagcatgggcggattgcccatgcttatctttttgaaggcgatgcaggaacgggcaaacatgagatgagtttgtggctggcgaaacgtctcttttgtacgaatgttcaatcagatgaaccttgcggatcttgcagtaattgtttgcggatcgctcaaggggagcacccggacgtactcatggtggaaccagatggacagacgatcaaagtagatcaaattcgtcaattgcaagaagaattttctaagagcggcttcgaaagtcgcttgaaaatctttcttctttctcaatcagaaaaaatgaatacaagtgcagcaaatagtttactgaaatttttggaagaacctgtagggaatttcttagcgattttagaaacggaaagtgttggacggatcttgccgacgatccagtcccgttgtcaaatcattcatttttcaccattggcgaaagacaaattgcagacaaagctgcaaaaagaaggactttctcaagagagtagccgtcttttgagttacttgacaaatagttatcataaagcagttgaaatctcccaagaggaatggtttaatgaaactaaggatgctgttgcacaatgggtgaagtatctcttgaagaaagatccgcaagcgtttattttcgttcaaaaaaagctgctcgctttagcaaaagaaaaagaacagcagagagttattttttcgattctgttattttattttcaggaagaacgagaccagttattggcacaaggcttatggggaaaagagatcaatcttgccatcgaagctgccttgcaagcccaaaagaaactgcaagcgaatgtagcttttcaaggcgttgctgaacaattttcagtgaagatcatctatggcataacagtaccctaaagggggagcaatgttatgatagaagtagtcggtgtacgctttcgcgctgcgggacaaatctatttttatgcgcctgagaagcgagattacacgtcgggggaacgagtgatcgttgaatcacaagaagcaaagtttatggcgaccgtcgcgattcctaagcagttgatcgattcgcaagatttgccttatgacataaagccaatcattagacaggccacgcctaaagatatcgagaaagaaaagaaaaatcgtcaagatgctgaagaagcgctgatcattggcaagcagaagattcgagcgcacaatttacctatgaaacttgttagggcagaatatacatttgagcggtcaaagatgctgtattattttacagcggatggtcgagttgatttccgcgaactagtcaaagatttggcgagtcattttcatacaaggatcgagttgcgacaaatcggtgtacgagatgaagcaaaggcgatcggcggaattggtccatgcggccgcaagctctgctgttcgacgttcttaggcgattttatccctgtctcgatcaaaatggccaaagatcaagggctgtctttgaatccgacgaaaatttccgggttgtgtggtcgtttgatgtgctgtttgaagtatgagaatgatgaatatgaacaagcaaaacgagaattaccggatcgcggcaaagaagttgagactccggatggaaaaggaaaagtagtcggtctggatttattgcagcgcattatcaaagtccgtttgtacgatcgacaaacgcccatagactatgaatatgaagaactagtgacaaaataagtaggtgaccataatgagcatggacaagcgatcgatttatgatggattgaatcagttagaaaatgaactgcaaaattcgttgaataacttagcagagatgaaacagtctttgcaagaaatcgttgaaaaaaatacgacgctagaattagaaaatcaacgtttacgggaacatatccgtgaattgaatcaagtggccgaagcgcccgcagaatcggtcaaacaagaattgtccaaatcgcgaatgaatttggaaaagatatacgaagaaggattccatgtttgttatgacttatatggatctagaagagaacatgatgaaccgtgtgctttttgtcttgaagtgatctatcgagaaagcggacgataataggaaatgaccagcgcaggtggctggtctttttttgaaagtagggaaagtatgcagaaacaacaaagctataaacaatcgaatggaacgctttatttagtgccgacaccaatcggaaatttggaagacatgaccgttcgttgtgtcaaaattttaggggaagccgatttgattgccagcgaagatactaggaatacccagaaattattgaaccattttgaaataacgacaccgcaacgaagtttgcatgaacacaatttcaaggaacgtgtgccgcaactcatcgatcaattgctagctggaaaaataattgcacaatgtagtgacgcagggatgccatcgatcagtgatcctggtcatgaattagtcaaagcgtgcattgcagctgatattccagtgattgccttgcctggtcctacagcaggattgactgctttgatcgcttctggtttgtctccgcagcccaatcttttttatggcttcttacctcgaaaaaagaaggagcaaaaagaagcattggctgagctggcgaaccagccggctacgatgatcttttatgaatcaccttaccgcttggcagcgacgatcgaaaatatgattactgtttttggtgcagaacgttctgcagtcatctgtcgagagttgacaaaaatccacgaggaatacttgcgaggttctttaaaggaactgttggactatctaggggaaaatacagtcaaaggagagtgctgccttttggttgagggatcgacggactctgtcgaaatcgtttatgatggaagccttaaagagcaagtaacagctctgatggagaccgggatgtcttctaaggaggctatcaaggaagtggcgaaacgcaatcaagtaaaaaaacaaacggtctatcatgcctatcacttagacgcttaaccgatgcctgtgcatcggtttttttgaataatgagtttcatttttagtggcatggatgattgggtgaaaccgtcacaaaaggacatgatatactagtttaaaaaggagaaaaagatgaacatacgagacatgcaaaaagcgatctatcaaaacaaaattgatcatcaatttaatgtcaccaatattgaaaaggaatttttgtcattatatggtgaagtggctgaagcttttgatgcttatcgcaaaaaacaaaatgtgggggaagaattggcagatgtagccatctaccttctcggtttagcggagatcttatcgattgatctagacggagagattcagaaaaaaatgaaaatcaaccaagcccgccgctataccagttatggcaatgggtatgcaaaacgaatcgatgaatgatggttcgtcattcgattgaactgacaatgaattgttaaaggaagtgggaaacgaaatgacaaccaacttaagcatacgtgagctaacagaaaaagatttaaaggaagctgttgaaatgtatattgcagtcttttcagcggagccatggaatgatcaactgaccgttcctcaaattacagaatatgtgtcatccatgatggcgatgaatacttatattggctattttctaacggactcattgaccaatgaaaagatagggtactcgttaggctttattaagccgtggtaccaaggaaaagaatatgtcatcgatacctttttaattgctggcaagcatcaagggaaaggtttcggctctgcttttttagaaaggatcaaagaagagttggtcaaaaaaggcattcccacgatactattagatacagaagaaaagatgccagctgccgatttttataaaaagaatggctttaagcctttgacggataatgtgactttttatgcgtcgttttgatcgtcattacccaagaaagccatcagtcgaattgcgaatgttagatttcataacatataaagtgagcttttttcagaataattgcaaaaatttaaaaaaacactagcgatctcctggatatgatggtaggatatctaacataaaagggagtgattggaatgggaacaggaaatagtgggtttattttggtttgcagtgggatggtttttttaatgactcctgcgctagcttttttttatggtggattggaaaggcgaaaaaatatcttgaatacaatgatgatggtgatttgcaccatgggactagcttcagttctgtgggtggcggctgggtattcgctttctttcagtggtaccggtgcgtttatcggcaacatcgataagttatttttccagcaagtttccatgacggacggagaagggattcctgaaggattgtttgcggcttttcaaatgatgtttgcactaatcacaacagcgatcattaccggatcagtcgtaggacgaatgcgtttttcagctattttcttatttattggctgctggctgtttttggtttactttccgatggcccatatggtttggggtggcggcttcttagatgctatcggttcgattgattttgcaggaggcaacgttgtccatattagttcaggaatcagcggtctcgtgctagcattagtcgtgggtaagagacgcgagtttcatcaaacggagtatcgtccccataatattccatttgtcgtactaggtgcagggttgctatggtttggctggtttggcttcaatgctggatcagcattagctgctgacgggatcgccattcaagcgttgttaacgaccaatacggcagccgcagctgcgatgctctcctggatgttgattgaaaaagttctattagggaagccaaccattgtcggagcttgtaccggagctgtcgtgggtctggtagcaattactcctggcgcaggttttgtttccctttggtcatcctttgtgatcggggcattagtgagtccgttttgttattactttatttcggtcatcaagcatcgcttaggtctggatgacgctttggatgcttttggttgtcatgggattggcggaatctttggtggaatcatgacggggattttcgctgatcctgctgtcaatcatcaaactgggttgctctatggtggaacagaattgttcattgcgcagatcattagtatcgtatttacgattctttttgcggggggcatatcctttctattgatccatgtgatcaaacgcgtgctaccgatccgggtcacagaacaagaagaagctattggaatggatcgcagtgaacatgatgaaacagcttatccaacgttcatggggctggattcatagatggaggaatgcagatgaaaaaagtagaagcgatcattcgacaagaaaaattagaagaattaaaggcagctcttgatcaaatagatatggctggaatgacggtgagtcaagtattgggctgtggtaatcaaaaaggggtcaaagaatttgttcggggacaagcagtgattacgacacttttgcctaaagtaaaggcgagttttgttgtagcagatgaagaggttgaagcaatcattgaactgattttgtctatctgccatacaggtgaagtaggtgatggtaaaatttttatttaccaaatcgaagaagcagtacgaatccgaaccaatgaacgaggcccatcggcgctgtaagtctagacgtttttaacgaagcgaaccaaatttgaagtcttaaatcataacgggaagcaaaaagaatttctgtcttttttacagggattctttttgtttgcaacaatcgccgatgcttagaatgagcctcttgatagggaacttctgttcgtttataatagaggagaatggagtggtgaagatggctgagttgcgttttccgttaaaaaacgatacgtctcggaaaatcatccatatcgatatggatgccttttttgcatcagtagaagaaagagacaatcctgaattggctaagcatcccttagtgattgcccgccacccaagtgatactgggggtagaggtgtcgtcacgactgccaattataaagcacgtcagtatgggatccattctgcaatgagtgcgcaaaaagcctttgaattgtgtcctcatgccgtctttatacctggcaaccatcagaaataccgcgaaatttctcagcaagtccgagagatctttgggcgctataccgatgtgattgaaccggtttctatcgatgaggcttatctggatgtgaccgtcaacaagatcaactgtccttcagcgatcaaaattgctcgcatgatccagcaagacatttggcagacgacccagcttacttgttcagcaggcgtcagctacaataagtttttagccaaattatcttcggattttcacaaaccccgggggttgacggtagtgatgccggaagatgccgtggtctttttaaaaaaattaccgattgacaaatttcatggtatcggtaagaagacagtgccgagaatgcacgaattagggatttataaaggatctgacctttatgaatggagcgaaatggcattgatccaagaatttggaaaaatgggctactcgttataccggaaagttcgaggaatccatgattctccggtcagtgtgacgagagaacgcaaatcagtcggaaaagaacatacgtatggcaatgcgttaaccacagaagatcaagtcatcagtcagctaagaaacctggcagaagaagtagaaagatcattgaaacgtacgcaaaaacacggaaagactgtggtgttgaaagtgcgttatgccgattactccaccatcacaaaacgggtcacgttgccagagtatatgcacaagaaagaagctattttttcacaagctagtttgatttgggaggagattctaggaatcgaaaaagggatccgcttattggggatcacagttacgaatcttgatccattagcttatgaaaatatcgtattgcctttgtgggaaacagaataaaatatatggaggcgcataatgacgacaaacagtcaatggaaagcgttactagaggaattcatggcacaagaaaatccagcacgaaaagttcaaatgcgggcgtacatgcggaaccaatttgactttttagggattccgtcacctgtacgcaaacaaatacaaagaccttattttgctgcaatgaaaaaggccgccatcgattgggcatttgttgaaacctgttggcaactaccttatcgtgaaatgcaatatgtagctatcgactatctggtaacgatgcagtcggtcctccaaccagacgaactggagaaaataagtgaattagtccttcaaaagtcttggtgggatactgttgatggcttgaataaagttgttggtgggctgactatgacctacccggagttgagccaaaagatgcttgcttggagcaaagcagaaaatttatggctccggcgcatcgccattgaccaccaactgcttagaaaagaaaaaaccgatcgcgagcttttagagacgatccttttaaataatttaggtagcgatgaattctttatcaataaagcgattggctggagtttgcgcgattatgctaaaacaaaccctgagtgggtgcaggcttttctgttaacgcacaaagatcagttagctccgttaagtatcaaagaagcaagcaaacatttgtaatgatggtgtgttttatgatcaaaataaaagggaatgtgccataaatctcctacaagtaacactatccgaacattaattattattgctcctgcggtgcagggactcctcgtcgcaaaagtcagaggaatctatcctagcaacagactattattcggtttaacttgttggatgatgacttatgtcacagtcccttttatcttttgtatcagtttgaaaactgaagtttattcaagtcgtcaaatactctttttgatttgttcatagcttttttctgcgtctttgcatttgtcccaaatcaccgcttcgcctagtgctagggatttaggaacatcaatgattcgttgattgctgctaccgcgaaattgcagattcaaattgcgtttgctcaattcgaaacggccatcaactaggatatcgatgcgagacagcaactcaagcttatcttctgtttccaacagtagttcctcgaaggtgtaaccagaccagctccaaatatctttgccatgaccgaactcggaacggactctgtttaccacttgcagacatacttcagtattcaaaaaaggttcgccgcccaatagtgttagtccctgaacataatcgtgccgcaaatcttcaatgatctgttcttcgagttctgctgtgaatggggtgccatagcggaaattttggactgctttattgaaacagccttcgcaagcaaataaacaaccactgacatacaggctattgcggataccttcgccgtcaacaaagttgaaggctttataatctgcaatatgattttgactatactcttttgcttgccattctttggggcgaggatttctcatgtgcaaaacttctttctaactattcgattattcgataaaaatgtccttcgcgactgtagcaaaaaccattagaaagcacaaatgcgcgagcaattccagcactcgttttctgcggactcctgaccaacagttgtcagttagaaagaagcagaatttgcttacgctttagtcgcgtaggggacacttgtttcagtcattatgtttcatatgtttgacacgagcggaaatttctttgtgacgaccgtgaaccattggtcgagcttgaggatttcctaggtaaccgcatgttcgtttgacgacgtcacaactctttggatcgtgattgccacattgtggacattcgaagccgcgttcagttggattgaaatcaccttcatatccgcattcataacaatgatcgatcggagtgttggttcctagataagcgacacgatcatacgcataattccaaactgcttcaagagctttgggattttgttgcagaactgggtattcacaataatgaataaagccgccagaacaatactttggatagtctttttcaaaatccaacttttcaaatggcgttggatttttgcggacatcatagtggaagctatttgtgtaatattctttatctgtgatgtcttcaacgatgccgaatttttctgtatctaaacgacaaaagcgatcggtcaagctttcgcttggtgtggaatagacgctaaaatgatagccgtattcatcgccccaagcatctgcatgggcttttaactctttcacgatggctaacgtgaattcttttgcttcaggatcattttcccactcaccaccaaagaaagcagcagctgcttcatacaatccaatataccctaaggaaacagtagcacgtttatttttgaacaactcgttgacactgtctttgcgatcgaggcgtttgccgaatgcgccatacatgtataggattggtgcatttgccggactcgcttctttgcaacgttctactcggtaaacaagcgcatctttgacgatttgcagacgctgctccagaagagaccagaatttgtcgcgatctccgttagcttctagggcaatgcggggaatattcaatgttacgaccccaaggttcatccgtcctacattgacttcttcgccatgttcatctttccagccttgcaagaaagaacggcagcccatcggtactttgaaactacccgtcaattcaatcaacttgtcataattcaagacatctggatacatccgtttcgttgcacattccagagccaattctttgatgtcgtagtttggatctgtgggttccagatttacgccgcgtttgatactgaaaatcaacttcggaaagattgctgtccgtttttcgctgccaagtccgttgatccggatctgtaagattgcacgttggatttctcgctcaaaccagtttgttcccagaccaaagcctaaggaagtgaaaggtgtctgtccatttgaagtaaacaaagtattgatctcatattccaaactttgcatcgcatcgtaaatgtctttttttgtcttgttcttcgcgtaagcttcttggcgatcctcgccgtcgatccattcacgcgcatcttgcaagtgtttttgatagttcaattcagcaaaaggtgcaagtaattcatccgtccggtctgcagaacaaccgccatattgactagatgccacattggcaatgatttgagagatctgagctgtcgccgtttgaatcgattttggtgattcgacttctgcgtttccgattttgaaaccattgttcagcatgcctttgaaatcgattagacagcagttagtcatcggagtataaggatgataatctaaatcatgataatggatatcacctttttgatgggcgttcgccacatgagggggcagcattttcaagccgatggatttccctacgatccctgcagtcaagtctctttgagtattgaagacattgctgtctttattggcattttcgttgaccactgcttgatctttattcattaatttattgatcgtaaagttgatatccgtcgctttgctgcgttcaaaatcgcgacgtgtccgatagttgatatactcttcggccaatgcatattcattttttgctaataaaatatgctcaacgatgttttggatttcataaattttaacgtttttggtaaaccgttcggcgatctcatgatcgattccttctacgatttctaaaatccgttcatgatcgaggggagatagttctcctttaacttttctttgggcttttactaatgcatcgtaaattttttggtcatcgaaatctactaaacgaccatcacgtttcacgatctttaattgggttaattgaggatggctacccccgctttgttcagtatttctctttaagtccatcattactatcactccttatcttctccaatatcataaaacaaaatatggttttcggcaactatatatagtggcttttattcgctaaataattcagtatgcacaatatgtagtgtatattcaaaagcggttttcaataaaaacttgatgataacaaggacttgcatgtttcacgtttcacaaaatgaataaaaattgtaaaaaatttttatgtgtaaaaacgaagcaggggcgatagagaagaaaatatgctaccataaagaaaatatgaagaaaagtagaaatagatcaaggagaatttgcatgaaaaaaatgatcgatgtgaagcacctgacaaaaacctatggaacccgcttcaatcaaaccaaagtcctggacaatctttctttttccgttgatcaaggggaatttgtggggatcatgggaccaagtggtgccggaaagacgacactgatgaatatcctctcctccatcttacgtccgagtctaggttctgttgcaatcggaggacaagaaatcacccgcttgtcagaaaatgagctaagcgattttcgccgaaaagaaatcggctttatttttcaagattttaatttactagacacgttgactgccaaagacaacattatcttaccactggcgatcgaccgtctttcggtcaatgaagttgaccggcgattggcacatctggcgaacttattgggaatcgctcatttgttagaccgctacccagaagaactgtcggtcggtcaaaagcaacgggtggccgccgccagagcaatcatcagccgtccttccgtgttgtttgcagatgaacccacgggatccttagactcaaaagcggcgacagagctgttgcgttatttagctgaaatcaatctgcaagaagatatgacgattctcatggtgacccacgatcctttcactgcaagttattgcaatcggattttgtttattagagatggtgtcttttttgcagaggtagtcaaaaaagggtcccgcaaagaatttttcgaaaaaatcatcgatatgcaagcgacgattggaggcggggatcgccatgctctataaaattggctggcgcagttttttgcagcagtttcgcaattatgtcgtttactttgtgtgcatgatgacggcagtcatgattttttattcatttagtgctatgatgaatgaccgtttgctgactcaacgagtgcagcaagacattcgcatcgatggcgtattaggttttggtagtacgatcgttgctgttgtggtgcttttttttatgctaagtgccaatcatttcttcttgaatcaacggcaaaaagagatcagtgtttatcagctcctgggtttgcgcagagcaaggttaagctggctactgctgagagaaacgttcctcctaaatcttttttcccttgttgtgggcattttcatggggattatattctcgaaatttttctcaatgatcttgattcgagtgatgggactatccatcactagtcatttttttaattcgcctcgttcgattttgactaccgtgttggtattttcgcttgccatggtagttttgagtggtcaagtggttttgtttgtctggcagaatcctttgatcgatctaatgaagaacaactatacactgccagtgagcaaaatgaagtgtcgcccatttcggatggcaatggggatcatcggtttgcttctgttagggatcggctattacttagctctgacgctacgaacgacactggagcgctatattaattatacagaagattatactgctgttttatggattccattgctgattttattttgctgtatcacagcgacgtatttgttctttgactgcacattgccaatgttgttgcatgtcttaacgctcccccgcaaaaaaatcagcaaaggcacacgcttgattgcattcaacaatattcgggcttatttgcagcggacatggaaaagtttttcattactgacgatcattactgcgatcgcgatttctttgattggtggcacgatgggggtgatttccttgaattatcaggcgaccaatcgtgattatcccgtcgattttcaagtcgcagcagaaaatgcggaagagttaaagcaagtgattctggaaaatcagagtcaggtcgtcgcggagcagacgctcacttttcgtatcgtgccgttaaacatcaacgcgaaatacttggccaatccgataaatacaggacaagaaaccgtattggtcaatgcgctttctttatccgattaccgagcatttcgtcgattggtgccggatgcacctgcggtttctttaggagaaaatactgctgttttgtttgatgatgattatgatattgcatacaacttgagaacttaccaaaaaaatattgcgctggaaaatggtaaaaaactcctcttagacaacacgtatcaagattattttggtgatattgcgttgcgttacaccttacccaatgtattagtcgtcaatgacaaggattttcaggacatgtcgggatttgactatcgattgacttatttcaatgttcaaacggagaatcaagagcaattaactcggacgttagatgatcgactttcagtcgaatggacctatccgttttattacaagcgaacacaggacaaaggccaagtcaagtatcagctgcaaacggagatctcagagaagcaacaatcatcgaaggagtttattactggttatcgcttgaacttcgccaatcgctatccgaatatgcgggccattagacggcaaggcggtattattttgttcgtttctttatttgtcggggtgatcgttttgatcactacgtctagcagtttgattgtacggcaattttctaatacagagcgggaaaaaagaaattatcgtttattgcgtacactcggttatagcaaaaaagaaattcgttcgatcgtctactggcagaatttttgggttttcatgccaggtacattactcgcgattttacatgccgcattcgcaatcaacacgctgacgcaaatcatcgtgagtccagggtattgggtggcacatctgtttgcaggtgttgcagccgtcgtattctttattgcttatttgattacagttaagttatgcttacggatcattgaagagtaagctgtcagatttttttcaattttgagctggtacaagacacgaggaatggtataatttaagggataaatgagtagaggagtagataggatggataaaaaagaagagcaattactgattgatctgacaactgcccgtggtgttccggggaatgaagaagaagtacgggaagtcttcaaagcatatgcgaaagactttgccgaagatatcttttacgatgggttaggaagcgtgattgccaaacatgtaggggatggcggcggacctaaagtttttatttccggacatatggatgaagttggctttatggtgacaaagatcaccgataaaggtttcatcgagtttcaaacattaggcggctggtggggccaagtgatgctggcacaagaagtagaaatcaaaacgcaagctggcaaattggttcatggtgtaatcggttctaaaccacctcatgtgttgacgccggaagttcgcaacaagccttatgatatcaaagacatgttcattgatatcggtgcttctagtgaggaagaagcaaaagattggggcgtacgtcctggagatatgattacgccgtatatccaatacaaacggatgaatgacagtaagtttttgctagctaaagcgtgggataatcgtattggaacagcagtttctttgcgtgtgttggaaacgttggctgctgaagggcatccaaattgcttgtttgctggcagtgatgtcatggaagaagtaggattgcgtggcgcacgaacaagtacgcacctagtgaatccagacatcgcgattgctcttgatacggggacagctggtgatacgccaggaatgactccaaaagaagcagattctgtcttgggcaaggggccgcaagttttgatttttgatgcatcgatgatccctcataagaaactcttgaattttgtgatcaatgttgcggaagaattagagattcctttccaatatacggtgatcaccggtgggggaacagatgccggtcaaatgcatctgacccgtgatggtgtaccatcgatcgcgattacagttccagtgcgctacttgcattcccatacttctgtcattcatgaagatgactacttaaatacagtaaaattagtaacagaagttgttcgtcgcttagatgacaaaaccgtgaaagaattacgaagctattagaaggagtagaggatgagaaaaaatagtgagatccgctccatggcatcacgtgcattaaagggcatgtgggggcggtatattttagcctttattgctacgatagccattcaaagcatggttagcagtttggtgctgtcattgacaaaccatacctttcaacagacacgagaaacaatcattgattatattttggaatactttgtttttttcgcattgacgataagtttaaatatcatggcactgttcttgattcgtcagcgggagatccatgtgtcggatatttttcttgtttatgacaagcgttattacgtaccttttctattgctgaatttggtgaatgctctcgtaaattatctgattagttttgtgacgtttttaccccatttagttgttggcggaatgaatcagtaccttgatttagtcttgaatgtcaacagtcggatcactgtagactggagtctcttccgttcgtcgatttccttcatcatcagttttcttatttctgtggtccttttcttatttgtctcccagatcataagcggattatttcagtttgcgatctatgtacgatacgaccatccagaaatgacgacgctacaagcgataaaaggagcttggcatttaatgaagaatcatatcggtcagtatattttgctgcagatttctttattaggatggatggttttaggtttgtttgcttttgttatcggtctattttgggcgctggcctacgcaaacactgcgaatgccgccttttatcaagcgttgatcgaaaaagaaaatgatcgcgttcttagctaaagaacacctcttgtaaagatatgatccacggttgtgacgttgggtgactcaatgcagcaatgagagagaaaatcatcgatttcttttgctaatgagctccagctgtcgcagccgtttttgctgtttatttttgagtaatccaatgcttttgtgatagcatagggataaggaggcggaagtatgaaactaacagttttaggatgtttaggcgcatatccctataagggtgagggaactactggctatttattagagtctgagggatatcatttgttgctggatgctggcagcacgacactgattcaattggaaaaaatcttggatccgttagcattggatgctgtgattttgagtcattaccatcacgatcatatcgcagatctgggtgtcttacagtattattggcagctatttcctaagcaagcagagcggaacgtattgcccatttatgggcatggagaagacagtattcatttcaatgagttgaccatggcgggagttacagaagggcatgattatttacaaacaaaacagttggaattgggaccgttttctgttacatttatgaagacgattcatcctgtaacttgttatgccatgcgctttgtggagaatagtacaggtaaaatatttgtattcacaggcgattccggctacttagaaagttttgtcgattttgccaaagatgccgacttatttttagcagatacctacctctttgcagggaatgagcgccacaaagctcattttacttctcaagagtctggagaaattgctgccgcagcgaaggtcaaaaaactggttttgactcatctcccacagcatggtgatctggagcaactgaaagaagaggcagcagcggcggccaacgggataccggttgaattggcagcagttcaaaaaatctttgagatttaaacccgaggaggagtagcagatgctttttgtaccaaatgaaaacaacgacccaagaatcaacctagccattgagatctttttgctgcaggaaatgaaggtggatgaaccgatcctgctgttttatatcaatgagccgtcgattattattggacgaaatcaaaatacgatcgaagaaatcaataaagactatgtcgatgctcatggaatccatgtggttcgccgttttagtggcggtggggctgtctatcatgattttggaaacttgaattttagctttatcatgccggatgacggtaattcattccgtgatttcgaaaaattgacgaaaccaattgttcaggcgcttcatgaaatgggcgtcgaaggggcacaattaaaaggccgcaacgacctagtcattgatgatatgaagttctctgggaatgcaatgtacgccaccaatggtcgaatgtttgctcatgggaccatcatgtttgacagtgacattaatgaagtggtcaatgcgttgaaagtgcgcaaagataaaatcgaatcaaaagggatcaaatcgattcgttctcgcgtgacgaatatcaaacctttcttaccaaaagacaaacaagatatgacgaccgaagcgtttcgtgaagagattcttttgaagatttttggtgtggattcagtcgaccaagtcaagacctatacattgactgaggaagattgggtcaaaatcaacgaaatttccgacaagtattatcgaaactgggattggaattacgggaaatctcctgcgtttgatattgaacgccgcaaacgatttccaattggatcgatcgaagttcgctttaacgttcaagaaggcaagattacagaagcaaagatttatggagatttctttggattaggagatattgctgacgttgaacaagcttttatcggcacccgctatgataaatctgcattgaaagatgtgattgatcaaattgatgtcaaaaaatattttggcaatattacccctgaggatttgttggaattagtttattgattttccagcaaatcaaaaaaagatgtggatataacgaaaatctatagaataactgaaatgcactaagaaaaagcagccacagatcctacgatctgtggctgctttttcttttagtgaacatgccgtttttttacgggttgcgcttttttctttttgctctttgcttagtaagctcgggcaatccaaacggtgtgtttagcaggtttcccgctgacgatgtcaactgttttttccataggagcttcaaatgggatatttctggtagtaaagccagtttcttctttgatcttggcttcagtttcttctgtcccgtcccaaccaattaagacaaaaccagtgactttatcttcttttttgcaggtttcgatatgtgcttttaactcttccagtgtttcgatatcgtaatactcgttctctttatttctgttacgagctgcttcaagcaaacgtggtgtcatcgcagccaattgctgatccacgaaatcagcaaggtcatcaaatgctacggtttgtttttcggcaagatcacggactttgaccattacatgcccattttctaaatctcttggaccacattcgattcgtaagcaagcgccctttaattcccactcgttaaatttgtaacctggcgaattgtcagaatcatctaagcgaacacgaatacctttggctttgaaagatgcaaacaactcttccaatttttctaaaatggcaggatttttcttccaaggtccgactggcatcaagacgatttgcgtaggggcgatcgttggtgggaaaaccaatccgttttcatcaccgtgagtcatgatcaatgcgcctaacaaacgtgtagaaacaccccaagaagttgtatgtgcataggtatgtttgttttctttcgataaataagtaatatcgaaagcttccgcaaatttcgtccccatataatggctcgtaccggcttggacagcttttccatctttcatcatggcttcgatggagtaggtatccaccgcgccagcaaaacgttcagaaggtgttttttgtcctttgtacactggaatggctaaaaattcttcgcaaagacgtgcatattcatccaaaattcctaacgtccgctttcttgcacctgcttcatcttcatgggcggtatgtccttcttgccataagaattcagaagtgcggagaaaaggcagtgttttcttttcccaacgaaaaacattggcccattgattgatttcatatggtagatcacggtaagaattgatccaatcagaaaaggctgaaccgatcatagtttcagaagtaggacgcaatgctaatggttcttctaatttttcattaccgacttctgtcacccaaggcaattcaggagcaaatccttcaatgtgatccgcttctttcgtgaaaaaactttgggggatcagcattgggaaatacgcattgcgaatgccttctgcttttaaaaagcgattaaattcttcttgaatatgttcccatagctcaaagccatcaggacggaagatgattgatcctttaactggcgaataagccatcaattcggctttttgaatggtctgaatgtaccattctgtaaaatcatttttttgtgtcattgtttttcctccttaaaaaataaaaaagcattccgtcctataaaaaggacgaaatgcttggatttcgcggtaccacctttgttgactattgctagtccaactcatgaaggataaggtcttcacaccgaccgttttgcggtcactaccattggcaggttcttcttattagcgggtattggatttccagcttgctccaactctctttaaccatcataagaatactgatccaaatcttacattcatgctaaatcgaaactcggaaaaaagcaagctttttttgtcattttgttattcattactgactagctctaggtaatctggcaacccatctgaagaaaatgtcagagaaaaacgagtggcttgttcctcatgtaagaccgagcaagacccaaaattttgctgggtcagtttttcaataatctgaagatcaaaatagttttcttcttcaaaggtttcaatattcggcatggcttctttttccgaagtagccaaagttggaaactgacagctgacgaacaattgattctgctgtttgatagcacttagatgaatcttccgcagggcgcgatctttgagtagatacgtttcccgaattgcatagtccattaaatgagcaaataattgtagaaaatcttcttcagctagttctttgattgcgggaatatccacatcataagagaattcaatgcttttttgctgagtcaattgctgataacttgtcaatagcagggttgttagagaatgatcttcacttttgattggacaggattcttctagcgtctgctcgattaggttgatttgatcaaaagctcccagcaaactgttgtcttccagcatgacttttgcagtattcaactgtttgcgaaaaccgagaaaagcttgttgccattgattgatttgttgttgaattatcggttgttgttcttcatacaagcgaatcttgagtcctgcgatatcctgtttttttgttttcccctcattatagaaaaacaaacgcagcaaatcatagcaccagcagacaataatcaagagtacgaagaaaatcgtattccaattgatttttgattgatcgctgtttaggacatcttgaatgtagataaagcagtgaccaatcgcggataaaacgatccagggagaacaaagaacaaaaaattgattctttttaaccgcttcatagatggcagcaaaggatgtcacaagagtgctaaaaatattcagtaaatggatataatccataatttccggcaagtggagttgatgggaaaagacagataaaatggctgctgcaccacaaatgccatggaagatcacctaaatcttgtacttctgttgaagaacttccattttcgataaataaaagccgatcaagaacattggggtaatgatcgataagacattcaacatcactgaatttatggtggggttaaagagcaaccctccaagaatatcgccaaaaccggcttctagtccagctgacagtgcaaaagcactgaataataatttcgaaacgagtaattttcgtttcttaactaatttaatccctacataaatcaaattaagcaagctgataaaacctgtcagaagaagcatgaaaatattgggaatcgaatgacgaaagacataactgactaaagcgtttgaagaaccaagaaagacctcagcgggatatcctgaataatttttgaaaggactagatacatagatacgtagtgtttggccttggtaattttctggcaaggtgacaaaagagagggttttcccaggattcacaagaccatctgctacttcttttttattggtatataaaagtttatcatttaaataaaccgtcattttctgatgatcgcccaccaacagcaatgtcgggtagtagtgctcattggtgattttacgttccattaccaaattttcattggtaggaatattaggcaaaaaattcacatagttactgtcgaaagttgtttctggttctgctgcagaataatacagccaatcttcctgtttttcaatagaaggaagactgatcactggattaatcagagcagaaatatagaacaagataattcccagagaaaaagcagaaatcgttaagaagggaattgcattcttcaagtttagtttgttatttttttaaacatatatgaattctcctgttttttatccacgtctagaataaaacaaaacaattgattaagtcaaatgataatgggtgttataccagaaataataaaataactaataaaaaaaatcatttaaaaaagcggactcatattatttgaaaaaatcattaatcgttataatataaacgtaatatacaaaaatatcaaaaataaaggagaactgtgatgaaaaaaaattctaaaacaagtatccttctttcttttacaacattaattattatgcttcttcctttactcatgattgttattccaaaaatgttagggttacccatcgctattgtgaagagtgacgcaatggaaccaacatattcctctggaagtttattatttgttaaaagtgtggatgcagaaaatttgattgtcggcgaggcaatcacttattttgtgaatcaaggggaacaaatatacacgcggcgaattgctgcaattgatcaaaatgagcaagtgatgtatacgatcggagacattcaagaccacatggaaacgaccaaaatcagaaaaagtcaattacttggccaacctttgtttcatttgcctcgaatcggtcatctagtcacgagcgaaactgtttctattgtaaaaaagctttatttggttttcaccatttatattacagcaaccacttttttggtgatgatttctcagatcaaacaagggaaacgaatggtaatgtaagttccactaatcaataacaaataccgcaaacaagttcagcaagtgctgtcctgtttgcggtatctttttgtttagaatcagatttgttgtttattctatccctttttttagcttcatactggaagcaaagtaaggatcaatccagcgccaagaagtccaagtccaaacaaccaatccttaagggtgactgaataattcactgcataggttcgaggtgcatcaccgacaaatccgcgagattccatggctgcagctagaagttctgaccagcggatcgatttgactatcagtggaatcagtggttttaaggatagtttggaataagtgattcctcgagatttcagactaaactggatgttgcggtactctttaggaatcataggtgccatatgaaaggctgccattaagccataagcaaaaacaggaggcaagcgaagttgctgttgtaaagaatagatcagctctgttagtgaggtcgtagcggcaaagacacttcctaatgtcccaaaacaataaacgcgactggcgagacgaatgccataggcatatgccgctgtcgtgctgccgttttgaccttcttggaaaaataatagcccggtaaaaaagatcccgactgcacttaaagacaagagaaaaagtaacttgagcaattttttcagaggcagataaaccaagagcagcaacaagaaaaataaagtcaaactgctatttagcaacaaattatcttgaaaagagacgagcaaagccagcgcggataaagtcagcagcttgactgttgggtttcggtacttcattggaagactcctttacaaaatgattgaaatcgaatgttcggtcacaaaaatctgacagaagacgcaaatcatggctaatgatgaagaccagtgtaccgctggccgctttgtctgccaataacgacatcaattgccaagactgccgcaaatcttgtccataggttggctcatcaacaagcaaaatcgggatctcacgatcgatcaaacaggcaacagctaatcgccgttgttgtccttggcttaataggaaaggagaatcttcctgtttctcccatagtcccaattggttcagcttttcagagagatcctctctttcttgaccattggctaattcttgtgccacggaggaagctagaaactgatcctgcgggttttgcatgacccagctcatccgatcgaaaggacgactgcgagaggtcaagcattgctcttggtaatagatcgttccatcatagggaacttgctgcaacagggctttaaaaaaggttgattttcctatcccgctttttcctgtgatgcctattcgttctccggtcgaaaagacttcgtctttgatcagcagagaatgtctgccaattggcaaacgaaaattttcaaaccgcaagaggggctgcggctcaataggaatgagggacggtttaatcatagtttgtcttagctgctcttcttgctctaaaagcaactgagaaggaaccgactgaaaagcatctgttaataggagccattcctgcacccagtcagcgaccggtgcgacttgatggtcgattaaaagaattccgattttctttttttgttgaatttctgttaatttttcaagcaatgattgggcggtcagcgaatcgagattagcgaaaggttcatctaatagaagatagcggctttctaaaacaagacagcatgctaacgctactagttgtttctccccacctgagagggttgtcagcactcgatcttctaaatgacgaatctcgcaaaaatcgagtgccgtctcaatacgacgagtcatttcgtttaatggaatggctctgttttccaaacaaaataacagctcttctcggggagttcgcatacaaaactgcgtatcgggattttgaaacatcaaactaacggacgcaatccgttgtacaggggataaatcagtaaaatctttctcatcgatcacatagtgtccagattcgaacccttgatccgacaaaccggctaataagcgaaaaaacgtactttttcctgaaccagaaggaccatagatccctttgatttccccaggatctaattcaaaggtagcggtaagtttttgctcatcaatcgtaaagacacaggagtctagtgctaaactcattctttcacacggcttcgtttgaagcaagtatgttgagcaatcggatagctattcaaaacccccatttttgctaagtgatcacaaaccactttaacaaggacagctgaaaaaaggagcgcggaaagcagacggatcacgaaaatagtcagcagtaattgccactttaaatcaagaaagctggaacggatcatgccccaaataaaactggtgacagtcgctcccaaagctcccaggatcaaagaagaccagccgaattttcgatagcgaaaagcggcaaagccagcctctgtgccgattccttgaagaaagccgctgacaaagataattggaccataaaagttacccatgaaaacctccaacaaagcggcgatcatttcagtaatcgtggctgcacctggttttcttagtacgtaaccggcaaatgcagacgccataaaccaaatcccaaagagaaattcattcgctagaatggcgaggccaaatggagttaacaaggtgctgagtaaaacccccaagtgaacggcccctaaataaacgacaccgaatacgagagaaacgatgcctaccatgatcacatcctttaattgccacttactcatgcaaagaggcctccttcaacgagggactattgactgaaacggttccttcaagaacataatgaggcagcttttcgtgtgcataggccagtgcttgttcaaaataggcgaataattgagcggctgtgccagatagcagcgtcacgtaatgggccgattgcggttgtaagcccatggcatccgccaacgagacgatatgcgcaatttcttccatataatcttcacgtccaaagacataaaaagaatatttgcactgaacgatgaacgtaccttttgcagtaatttgctgatgatttggccgttcatgcttgccgctgagaaaggcatcaccagccagatctcctggacagcctttcgaaaaagtgaactcaccgaccaaatgtgtttttgggtcataggcattgacaaaaagagctgctgccgcatcaatcacactggcagcttcaccacggtagagtgtactgaaaagatctgtctgctgccaaacggctgtggtatcggtctctttgatgcttcgaagaatgtgagaggcaaaatcatctttcattggataaagactgatgcggcatcccgtgatatcgatttgattcattgaacaattttccatagtattcttcctttcgaatgattttctgtctacaaaaaaagcgttcctccttttctatccacgggtagacagaaaaatgggaacgcgaaataagctgcgcaaccacttccctacgttggtattaaccaaatcaggttcaaagggaccagacaaactgtctatctcagcataaagcgcccctagtggataattcgattcaattactttctgagtgtagcacagacgatttgaaagaacaagtcagacagcgcgagcaaaaagacaaatgaatcactgcagatatgaaagaatagacatataaaaaacatctttttaggtgttgacagattgttttcccttgtgtaaagtaaataatcgaaagtaaaacgtaagtgttacgatttgtgaaaatcaaatcgtaacaggctctctggtgtttttttaggagaaatgatcgttttgctaaatcaaaaaggggtgctggtaaagagatgaagaaatttttaaaaataacaggtatttcgcttttaaccatagggttggctgcttgcagtgtgacaaaggaatcagcgaatgaacagacagaacaatcaagtgatccaacgattcaagtcctcgctagtttttatcctatgtatgattttactcgcaatgtggtgggaaatgaaggcaatgtcgaattgttgatgccggcagggacagactcacatgactatgaaccatcggctaaagatatggcaaaaatccaagaagcggatgcctttgtttacaataatgagaacatggaaatgtgggttcctgccattgaatctacattgaaagaaggagatgtcaccattgtgaaagctacggaggggatggtgttgctgtcgggtgatgaagagcatgaccacgatcacgagcacgatcatgaagaagggcactctcatgaattagatcctcatgtctggctagcaccaagccttgcaatcaaacaagtagcaagcattcgtgatcagctaagcagggcttatccagaaaagaaagctgcttttgaaaggaatgctgcggcctatttagaaaaattgcagtcattggatgattcttatcagtcagcatttaagaatgccaagcaaacgcattttgtcacccagcatgctgcttttggctacctcgctttggaatacggactgacacaagttccgattgccggactgtctcccaatgaagagccttcagcggtacgtattgttgagttgaagcattttgtagaagataccgggatcaagacgatttactttgaagaaaatgccaaagacagtattgccaaaacactggcaacagaagctggtgtcgatttatccgttttgaatccgctggaaggattgacacaggaacaaatggatcgtggggaagattacatttccatcatggaacaaaaccgagacgcattgatgctgactacttcacaagccaatgagaaagaagtgaaagaagcagagaaagaaaaaaccgtttataatgggtatttcgacgacgcagatgttcaagaccgctcactcacggactggaagggacagtggcaatcggtctatccttatttgaaagacggcacgctggatcaagtttttgactacaaagcaaaacagaataaaagcatgacggccgaggaatacaaagactattatacaactggctaccaaacagatgttgcagaaattacgatcacaggagatacgatggcatttacctttgaagatggcacaaccaagaaagcaacctatcaatatgtaggcaaaaagatcttgaattaccaagcagggaatcgcggcgtccgttatttgtttgaatcaaaagataacgatgcagccttcaaatatatccaatttagcgatcactcgattgcaccaactgattcccatcattttcacctttattttggcaatgaaagtcaagaagcattattgtcggaaatggatcattggccaacgttctatccgactgatctgtctggattagaaattgcacaggaaatgcttgctcattaaaaaaaagattgacaattactgctcttttcgtcaaagttaaactgatagaaaggagcggtatttttttggaaaaaacattgaaaaaattagcaaaagtaatcgatcacatgatggatcatgtcgcgttgttcggtggtccgagtgttgtcagtaatgatgatttagatcattacttagatccggttttttatttgattttttgtgcagaacaaaagacgaataaaagaatgctgacagacaaagagtttgtcgaatgggtctatacggaaatgatgcctcaagagattccttatgatttgaatttcctcccctttgctaaattagctattgaagatttttattattgcatgtataaagaacagcacatcacaaaagaacaataccaagagattatctttgttcttgcagaaaaacagcctgtgttttactctcgcatgtcaaaaccgcatttctggtcttcagagaagaaagcggcaatgctagagatgcttcatgatgtcgaaccggaagatcatgatttggttccgatcgaacatccctatgaaaatcaacgatcgccaaaaatcgtcccttttccaataaaaaaagttcctgaagctagcgaagaaagaatcgctgcatatcaaatccgtattgatttggaaggtttcaagccgccgatttggcgaaggatgctcattcctgcaggcattagttatgaacaactccataatatgatccaaattgcttttcaatggcaggattcacagctctacctttttcttgccggcaataattcaatcgatgtgccgaacacggaacctacaaatgcattagtgatcgaccatgatttccaaacctgccaaactctgacctacatttatgacatgggtgctgactggacccacaaaataaaaatcgagaaaatactgacggctgctgaagcaggtgaaacagtcacgcctgattgtctaaaagcggttggtgatgtgccaaacgaagagcaaccagaggaacaaagagaatcagtgaatgttgaaacaatcaatgaagaactccgggattactgggaatctgatccgtccgactaatttttttctcggaataagtgcaataatcgattcatacgatggtgtgacgaatctgtttaacagttcgtgacatcttttttgatcggtccttgtttgattaaggtgttgaccattcatgaactacatcaagttagctgatatagaaatactcatttctgtggcgacacgcctggtttgatacagattctaactttttaactctagagccaatgattcagcagattgattttcgagtacattcgagtacaatagttcgtaataatactggacaagcgacgatgctctatctgctgtgaggtgcatctttcaatcgctctagaagatggactatctgttctggcgacagctgagagcaagtgaggggagtttttatgaaaaaacgagaatttatcgttcaagatttgcttagtaaaatttatcaggaagaatttattgaaggaaaattaccgaatcaaagagaacttgccagaaattatggcgtttcccgctttacgattcaacaagcaatcaaaaatttagaagaaatcggcatcgttcgtgtggtccaaggatcgggaatctttatccatgagaagtgggtcaaaaatcccatgatctttaattccttgacacggactccttacgatcggatccactccaaaatgatttctttgagtaaagcacccgctaccccagatgaacaaaaaatctttcagttagcagacaatgaagaagtttggacttttgaacgggtgcgaatcgtcaattataagattgaacagctagaaacgtcgaagctaccggtaggattatttcctaatgtcactcaagaggtagtagaacattcaattcagcgctatgttgagagttgcggatatcggatttcccactacatcagcagttataccccgattgcgacttcaatggcccagtcggcaatcttgctgtgcaaacgggggaccccagcgatgcaaatcacgaatcgggcaattttggaagatgggcgggtctatgaattcagcaacatcgtcgccatcgactatgcagtcacctatattcgacctttcgatcgagaaatccatcgttcacgcatcgattgatcggcagaggaagagccacaaatttcctagacgataaatcaaaaaaactcagagctctgattcaacaatttgagtcaggctgctgagttttttaggattattatttaaggtgtgattagtgtaccatccggcgttctgctttgtgtccactcatgggggcggtaaacgaccggaaaatcagccgcagcttcttcatcaaatgtaataccgatcccgcttttttccattggatagaagaagccgcctttgggttggggactgccaacaaacacggattgggtatttgccggcaactcgattgtttcttggatcgcggcattgtgcagatggatattcaaatgcgtattgactgccaagccgactggactgatatcagaaggcgtatgccaggcaattcgaacccccatcgcatcgcaaaaatgagctagcttcaatgctggcgtaatgccgccaatctgtgatacatgggcccgcatgaaatcgatctgccgatttttgactagttcttgccattccattggattattgaacaattcacctgttgcaatgggggttgctgactgactgcgtaattgtgtcagccagtgactttggtcaggcggcagaatatcttccaagaaaaagagctgataaggttctgctgctttggcgaactgaatggcttgattcggatggaggcgttcatgaacatcatgcagcatttgaaattggttgccatatttttctttgatcgctgcgaacatcttcaaagtcgtttccatataatctgtctgatcaaagtaagagccggagattggttcttcgggtgtttgcagctggcttggattcccgccatagaacccgagctggcaacgaatatagcgataaccggctgccaaaaagcgatcgatttcgtgatagagatcgtctaaattatctgctaccgcatgagtataagcagggatcgcggttcttgcttttccccccagcagttgatacagaggcatatcagctaactgtcccttgatatcccataatgccatatcaataccagagatggcattgtttgtgatcggaccgttgcgccaataggaattgacattcatgacttgccagatgtcttcgatttcattcgcgtctctacccatcagaaggggacgtaaatattcgtcaacgactgttttgactgctaaaggacgaaattgaaacgtactacagcctagtccggaaattcctttattggtttctactttaacgacaacaaggttatggcgatcaggtttgatcgcaaaggatttgacgtcggtgatgatcgttggtgtcattttattcactccaatttttgtatctagttgatatagccattgaaacacgcagagcaaccgctgtcaatttggtccaaaaaaagatggctatggctcataaaaccagtccaattttagatggattcttatttatttgttgatacatagcctttttggtctgtttttttaataaaaggactggttttacaagcgggtgcagccatgctactatgtgtgtgaaaacggacccacttgaaaaggcgcctcaagattcaagtccgttagcaaacaacaggaggaaaaaatgatgatgaaagaagacatcgtaaaacagatcataaaagatgttggtggatccgagaatatcaataatgcttggcattgtatgacgcggcttcgttttgatttgaaggatgaaaagaaagttgactatactgctttagaaaaaatacctaaagtggtgggaacgaaatatcaaagcaatcagctccaagtggtgatcggtacagatgtagcggattattatgctccattagccaaagaacttggtttggatgaaaagagtcaagagtcttcagagaaaaaaggcgctgtctcgttgtttatggatacagtctccggtgtattcggaccaattgttccagcaatcgctggggcaggaatgattaaagggttgatggcaggattggttgccttaaatgtgatttccaatcaaacagatacgtatttagtcattgatatgatcgccagcggcgtatttaccttcttgccattttttgttgctgcttctgctgcgcgcatctttaaaacgaatcaatacttggcgatcgccattgctgcaacattacaatttccaacgatgacgaatgcagttgctgaaggcaatatttcggcctttcgactgtttggggttttaccagttcccgttttcaattatgcgggtaccgttattccaatcatttttgctgttttagcattaagctacatttatcgctgggtagacaaggtattgccgcaagttctgcggaccgtctttacaccgacgatttccttgtttgtggctggactgattacactgacagttattggtccaatcagtattcatttaggcaatttgcttgcagatggtgtagctggcttgtttacgatttctcctgtattggcaggaattgttgtaggtgctattcgtccaattgcgatctttaccggattacaccatgcaatgacgccaatcgcattacaaaactttgccaatcaagggtatgatatgttgatgccaatgatgttcatggcaaatatggcgatcaccggcgcaaccgcagcgatctactttaaagtaagatcaaaagaagaaaaatcaatcattttgtcctcagctgtgtcaggattgctgggcatcactgagccagcattgtttgggattttatcaaaatataaaaaagcatttttagcagctaccatcggtagttcgattgcatcagcgttcatcagcttttttggcgtaaggatctatggctatattttatccagtatctttagtttgccggcttatattggtgaatactttatctatgcggtcctaggcattgtcttggcgatcggttcctcttttgctctgacttatttcctagtccctaatcaagcagaaacagaaaccttcaccaacgaacttgatttgcatgttgtaacgcaaggagaatacattccattggaagatgtacccgacgaagtgttttcaacaaaaatgatgggtgaagggtatgccattcactctaaagacggccaaatctattcgccagtcagtggtgaagtcacttcggttttcccttccaaacatgcggtgggaatcaccacatcgaatggtgtggaagttctagtccatatgggaatcgatacagtttctcttgatggcaaaggctttgaagtattcgtaaaagtaggagagcaagtaaccccacaatcgaaactagcagcgatggacttgccttatatcgaacaacaaggcaaagaaacgatggtcgtcgtcctaatcacgaacatggaacgtgtccaacaattttcaggaacgatcggtcttgaaggaaatcatcaagccggtgccctattagaaaaggtaattttaaacgcttaaattcaagaaaaaaagaggtttaacaagaggggagatgcacctggcaaaaacagctgcggcatattctgtccaattgttcgaaagaaagagctgcgacaagacttttgttacagctccttttttttaccatcagtgacgttgagtaatataggcagctataggtttactatatttctcaaaaagtttttgcttttcagaagggttctgaccttgattaaaatattcagccagtaaataaccgatatagggacctgtggttaatccagaagaccccagtccgctggcgaccactaatcctggctcactgggaagcagtccaaaaaatggcgcaaagtcagaagtataggcccgtgttcctacgcgaactgtcattagcgcagcaaacaatttctcgggggctgccaaaaatgaaccgatgccagtcagcaattgttgctttgctgcttcagtgggagtcagatcccaaccgccatcattttcgtgagtcgctcctaaaaggatcttcccattcgcaaaaggaatcaaatcgccttcgccttctaacatcgccactggccaatcttttgctgacgctgtcgtttcgaaggagagcagctgtcctttttggggacgaacatcgacgtggtagttcaagtgttctaacagttggcctaatcctggtccggcggttaaacaaacatgatccgctgggatttctgcgtatgtagtagaaacgacccaatttttttctttataaagtctagccttcccttggacgaaaacgaccccattggtacgggcccgttcttctaggaacgctagataagcagcgccatctagtcgacctcctccggaaattttcaaagccggtagtggtttgagcaaaggtaaagcttgctgcgtttcagcaggagaaagacaggtgatttgaccgatttccggtgcctctttgcgccgttcctccgccagttccgctaatgctgccaactgattttctgggcgaatgatcaatgtacctgagcgttgataaatatctgtggtcagtgagaaatcttgtgccaatttttcgaaaaaagcagccccatctttagctaattgataccatcgtttgtttcgccgtttcgaaagccagggggaaatgatcccggcactcgctttagtagcttgtcccgtagggtcgtcaaccacggtcacttggtacttcgtcgtatctagataatttgctaaggtcatcccaatgatgccgccaccgataattacgattttttccataaaactgcaaactccttttttgtttcaatcattgttccatattcttctcaaaaaatcaaagactgaaagtttctgtcgaaagtgattcccaaactgttcccatttcaaatgactggattttctcgtataatggacatggaaaagaggatattatgcaatcaatcaatcaagttttaagagataaattcggttataccagctttcgggaaggtcaagaatcaatcatcaatgccattctttctcatcaaaatgttttaggcatcatgccgactggcggaggaaaatctgtatgttatcagctcccagctttattgttagacggtctgacattagttatttcaccattgatttcattgatgaaagatcaagtagatgcattgaatgacatgggtatcccggccgcttatatcaatagtaccttatcagctccggaaatcaaccaacggttaaggcaagcatcgaaaggagaaatcaaactcctgtatgtcgctccagagcgtttggaatcagatcattttcgcgaattgctgcgctatgttcctatatccctactcgctgttgatgaagcccactgtatttcacaatggggacatgattttcgtcctagctatttacgcttagcggaaacgatccatagttttgatcagcggccaacggtggtggcattgacagctacagcaacgccaaaagttgcccaagatattgaacgactgttgctgattccaccagagaaccaagtgaaaacgggctttgctcgcgaaaatctatcttttgaagttatcaaagagcagaaagatacttatttgctgacctatttaaagatgaacaaaggacaatcagggattatttatgccagcacacgcaaagaagtcgaacgaatctatcgtttattgaaacaacaatctatcaatgctggacgctatcatggcggattaactgaagaagaacgtacgcaaaaccaagaagattttctttttgatcgtcttcaagtgatggtagcaaccaatgcttttggtatgggaatcaacaaaagcaatgtgcgctttgtgatccacgcccaaatccccggtaatttagaatcttattatcaagaagccggacgtgccggacgagatggtgaacctagcgaagccattttattatacgctccgcaggatttgcagattcagcagttttttatcgatcaatctgagtccgatattcagtatcgtcaaaatgaatacctcaagttgagagaaatgagtcaatatgggcatacacaaatgtgtcttcaacgttacatattgcggtattttggggaagacggtcccgattgtggccgctgcagcaattgcttagatgaacgagaacaggtagatatcaccgttgagacgcaaaaagtgttgtcctgtgtgaaacgaatgggtgaacgttttggcaaagcgttagtggggaaagtgttgaccggatcagcagatcagaaagtcacccaatggggatttgaaaaattgccaacctatggtttgttgaaagattggtcacaaaaagaagtcaatcaactcattgactacttaaccgcatcaggctatttagtcccttcggaaggacaataccccctgctcagtgtgtcagctgccggtgtagaggttcttttaggcaaggcaaaggtttaccggaaacaagccaaagtacgtcaattggtcgtcgatgacgaattgtttgaccaattacgttccctgcgattgacgctcgcacaagaacaaaacttgccgccgtatgtcgtcttttcggacaagacattgcgggaacttgcggagcagcagcctaaaactcctatcgaatttctacagatcaaaggtgttggtcaaaacaagttagataagtacggtgatgcgtttctggctgtgttgaaagaataccgagaaacaacagaaaaatagtgctgctttacgattcaggaaaaaacaaggagaaaccaagatgctgaagattcgttatgcgcaaaaaagggatatgacattctggttagaactagataatcatttgtcaaaagcaggattagcaaaaaagttccaagatcaacaggcgttgatcttgaccgatgaggaagaacctgtggggattcttcgctaccaattgttttgggataccattcccttttgtaccatgctggtggtcaacgaatcccagcagagaaaagggagaggaaggcacttcctccgcctttgggaagcagaaatgcggaaacaaaggtatgggatgtgtatggcctctactcagtctgatgagagcagtcagcatttctatcgaaaatgtggctacaaagatgccggtgggttgcttatggacgtaccaggttttgaacagccgttggaattgttttttgtgaagccgttgtcgatacagcctcagtctgtagaatcagaagaatgaaaaaataggagcgataggcatgtctttttttggaaaaatagatttcaacgatttatcagagacggatcgagcaatttatcattatatgtccagtcaaagtgacaagattccttatatgcgggtgagagaaatcgccatcgaatcccatacatcggcctcttctgtgatgcgctttattcgtaaattaggctatgaaagttttacggagtttcggtcgcatgctaagatgcctcaggttgaaaatgctgatatacttagcggaagcacgttattaagcgctgatcattttcctaaaaacattgagagtaaattgagacgagtggctgagaaactgattgagtgtgagaatattattttttatggtattggtgcttctgcatcaatgtgcgagtatgctgcgcgtcgattttcaactttaggctgtaatagttttgcattagtcgatcatacatatccgatttttgcaaaactaaaaaatacatctgataatatggtatttgcgttatctattacaggagggacaactgaaatcatagagttgtttaacggatttaaaaacaacccggactttacaacggtcttaatcacaagcgattctgcaagcacactgggtagaatgagcgattttgtattagattattcggttgatgtgaagagaattaataagcacgaggatttaacaagtcaaattccctgtatgtttttgattgaagccttatcagaggctgtgcgccaactcattacatttgatagagattgaaattattcatgaccttggtacttcgtgtaccaaggtgcttttttttctaatttgcttctcgtgtaccgatttattagtaaatgcacgatgaatatcggactttttgtatactcaaggagaataaagagaggatgaagaatcatgaatacatttccagaaaattttttatggggtggagctgttgccgcacatcaggttgaagttgtgtggaatgttgagggtaaaggtgtaagtattgcagatgtgatgaccgcatgaggaaatggtatttccagagaaattacagatggtgttatagaaaataggtattatccaaatcatgaagctattgatttttatcatctttacaaagaggatattcaattgtttaaggaattgggtcttaaagtattgcgcacatctatcaattggacaagaatttttccaactggcgatgacaaagaaccaaacgaaaaagggcttaaattctaagatgatctatttgatgaattacttgcaaatggtattgagccagtcatcaccttatcgcatttcgaaatttcctttcacctatataaagcttatggtggatttaagaataaacaattaattcctttttttactcgttatgcggaaagtgttatgacgagatacaaaaacaaagtcaaatattggatgactttcaatgaaatcaataaccaagctgatggataacataatttacacacctggactaattctgcttttttatttgatcaaaataagacccaagcgaataaggaagagataatttatcaaggtgctataaatgaattgattgcgagtgcacaagttgttaagttaggacacaaaattaaccccaaatttcaaattggatgtatggtggcaaacgttccagtgtatccatattctagtaaacctgaagatcagatgtcggcacagaaagaaatgaatagacgttttttttatagtgatgtccatgctagaggagagataccccaatatgtcctaaagaaatgggatcggaaaaactattctattgatatctcagataaagaaaagaagatattaaaagaaggtaaagttgattatatcggctttagttattatatgtcaggcactgccactactctggatgagaatggcgagttgatcaatgatttttcaaaagccaaatggttaagcaatccacatgtgaaagcaagtgattggggttggcaaattgatcctgttgggatgagatacactttgaatatccttgaccaacggtatcagatacctttgtttagtgttgaaaatgggtttggggcctgtgatacagtcgaaaatgatgaaattcatgatcaatatcgtattgattatatccatgcacatatagcagaaatgaaaaaagctgtcttagaggatggagttaatttgttaggttacacaccttggggaatcatagatatagtgagttttggttcaggtgaaatggagaagcgttatggcatgatttatgtagataaaaacaatgacggaaaaggtacactaaagcggttaaaaaaagattcatttaaatggtaccaaaatttatcgcatcaaatggagcagacatctgatgattggtacaaggggtttcattaaggtacagaagccattaagctggtacagcaaccaaccttgatgaaacccattgaatgtgaaaacgtttttatttatagtttgtttataatgttgataaaaaaaaacgtttttatgtggtgatgataattaatacacgaacaacaatccgagacgttgcaaaagaagcaaatgtgtcaatcgcaacagtttcaaaagcgttaaatggcgttgatgttgttaaagcatcgacgaaagcaaaggtcatagcagctgcgaagaaccttcattatgtgcctaatcttatgggaaaggaattaaagaaaagtaggacgaaaagaatcggattttataccacaagtatcactggtccgtattttagtgttctgattgaatccatagcaagagaagttgaaaaacatggttacgctttaaatgtgtttatttcaatggaaaaagaagttgtcttgacgagtattctgggaggtgctgtagatggatttattggatttgaagatatgcttgatgaagaagatcttgagataatcagaaatgaatccgtcaatgccgtttttattgatcgtaatattcaagatcatacatttggtagtattgttttcaattccaatgaaagcgctgaatatgcaacatcttatctgatagcgaaaggccatcgtaatattgcattcgtcaaaggctttgatggtgtttatgatagcgatgaacgattcaagggatatcagcaagcactaagaaaagcacacattcctctaaagccgcattatctaatagaaggaagatttgaagaaaatttcgcatatcaatcgacagaaaaatttttgcataagcaaaaagatttaccgacagcatttctagcgggaaatgatcttagtgctatcggcgtaaccaaagcgattgaacatgcaggctatcatgtgccgaatgattttagtgttgttgggtttgatggaatcgagctgttgaaatattttcgaccgtctttaacaacaattgtgaacccaatcaaagaacaaggggagcttgcaacgcaacatttagtaaagctgatcaatggggatgtttcaggaaaatcctttgtattaaatggaagattggttgagggcgaatcagtatatcagtttaatagaaatgagtgatataaatgtatttgggaatagatattggtggaactacaatcaaatatggatttattgatgataaaggacaagtttattgtaagcagagtatcaaaacgatcgataatagacatcaattcttggtaaacctacaaacaattattgaagagagtcagaggcaagaaccaattgaagggattggaatcagcgcaccaggaattattgatcaacacggcacaatgattacagcaggagcaatcaagtccatctatggtgttcgtctaaagcaagaattacagaagataacgaaagtaccaattgttatcgaaaatgatgccaatgctgctgctatcgcagaacaatggattggccatgctcaagggattcccaattacatatgtatggttctaggaacaggcataggtggcggtattatttatcaaaatgaattgatcaaaggtgcccatggcatggcaggcgaatttggctggatggttattaaggaaattaatgaaagcgttgacatagaggcgatgtctttgaatcagcgtgcagcagtgattggtggtttatgttctcgttataatgaaataatgttaaagaaagattcaaagttcgaaccaatttgggatgcaaaagaaatttttgctaaagaagaggatgacgatattgcccacgacctcattcatagtttttatgaagatttatctgtcggtatattgaacttgatcagttgttttgatcccgaattggtattgattggtggtggcataagtgcaaacacgttatttttagagcgattgagctccaccatttcaaaaatgacagaaagacatcaaagtattcattatttagtgggaaaaacgatcgcacctataaaagcagctaaattgatgaatgatgctggcatggttggagcagtatatcaagtaaagaaactgattctaaatgaggcaacaataaactgaaagtgaggggaacagatggaaacttccgtgcaaaatgcaaaacgctctactaataagataaaaaagtggttctctgttttttttgaacaatgggaattgcaaagtatggtctggccaggaattatctttatgatcatttttaactttattcctatctatgggctgatcattgccttcaaaagatatacagtcatcgacacacttgaaacagcaccttgggtcggctttgaaaattttcagatcatattaaatgataaatttttttggggatcagttgtaaacacgcttggtatcagcttcttgaagctacttataggttttgttttaccgattatcttagcaatcttgatttttgaactcagacaaggtgtatttaaaaaattggtccaaacaatctcttacatgccttattttctatcatggattgttctaggcggtatgttgattaattggctgtcaacaaatggattactcaatacaatattgagtggacttggtttttcaatcaaacatgaaaactatcttttatcaacgaataaatactggtggattgcggtattgtcagatatatggaaaaacactggttggggtacgattttatacttagctacgttatctaaaattgatccctcatattacgaagcagcaaaaatagatggggcaactaggtttcaacaaattatgaaaattacattaccaatgctaaaaggaatcattagcttaaatttgattctgactataagtggattactgggatccaacttagatcagacaatggttttgatgaataatcaaaatcaagcgaaggcggaagtgattaattcatatgtatttagaatggggatagcgcaaggcgatttttcttatgctactgcagttggattaggtgtgtcaattgtatcagtaattttattggtatgttcaaatcaaatgaccaaacgactaaatgacaatacgtccgtattgtagaaaggagcgttgtatggaaaaaaaagtgatgaaaaaggatgtagatagtcgtttattcgacattttcaatattttgatcttaaccattttcaccttgattatcgttattcctttatggaatgtggtggtatcatcattcgcctctggaagtgttcttgctaaaggtgactttgtattctggccttctgaactgtcactagagaattatcgagcagtattcagagatgggagtatgttgcaagctttctttatttcagtttctaaaacaatctttggtgttttaacacatgtatttttctgtgccatgatggcttatgctatgagcaaagcaaatctgaaaggcagaaaattatattctgcgatgggtatcactacgatgtttttttcaggtggaatgattcctacgtacttattgtttagacaaataggtttgttaaatagcttctgggtttatattataccagcgctgttaagttattatgacgtcattatattaatgaatttttttagaaatgtacccgattcattagaggaatcggcaatgattgatggtgcaggtcattggcgcatttttttgcaaatatttttacctctgtccaaaccagctctagcaacaattgccttgtttaatggggtaaaccaatggaatgactttatgacagctagaatttttattactgataaggctctttacccattacaaatgaaactatatgagatcattgttcaatcacagacacaagggatgcaaaacatcggaacggctgtggcagaaagtacaaccaaaggtgtccaacttgctacaatcgtggtcacaacgattccaattctgattatttatccattactccaaaaacatttcattgctggaatgatggtcggagctgttaaagaatagaaaaggggaaaacaaaaaatgaaaaacttgagaaatttagttttgctgtttagttcggtgttgttgctaggtgcatgtggagggggagaagataacgcaagtcaagaagcaaaggatgtagatattagtgagcgttataatctagataaaaatacgccagcatggcaattggataataaggaagaagtcacagaactgacatggtatgttaatgctgattggtggaatgatgaatggggaaatgatgtcgttacaaaaaaaatggaagaagatttgaacatcaaagtcaaatttatcaaaggtgatgatactaacttaaatacaatgttttcaagcaatgatatggcagatatcgtcacaatttttgattcaaactcacaagttgcgcaaaaagctgatagttgggcctattcattagatgaacttgcagataaatatgatccttattggcaaactgtagctgcaaaagacacattaaattggtttcaattagatgatggaaaaacgtatggatatcccaattattctaatacagcagaagattatgatagcggtttaattcctgctaacacaaactttttgattcgaaaagatgtatataaggcaattggtgagaataattttgaaactgcggatgatttcatagcgggaatgaaatctatcaaagagaaatatccagaacttgttccctttggtttcaatgcgttgggtgatggggctggatctttaggtgatgttttccaagactatttgggtgttgatctagaaacaaaagagggtaatttttataaccgtaatctagatcaagagtatttaaactggttaaaagtgttgcgtcaaattcatgaggatggaaatttgtcggatgatagtttttctgatgatggtacagcttttgaagaaaaagtgaaatccggtcaatacgccacaattatggctagtggtacagcacaaatgagtggttttttacaaagctggttagctgaaaatcctaatggtgagtacattgcaatcaatggaccacaaaatagtgaagggaaagagcctaaattaaatcaaagtggtattactggttggatgatcaattatattagtaaaagtgctaaagatccagctaaggccatgcaaatcttcacttatttacaaagtgaatacggcggcattctaactacttttggtattgaaggagagactttccaatatgacaatgatggtaaaattgaattactgccagaagtgcaagagatgaaagataatgattcagatcgattcaaaaaagagtatcgactaagtgagtttattttctttggtcatgataaatatcaatcaatggctagtgaaagtactcagacacctgccttgatacagccaagagaatggggagaaggaaaattataccctcattttattctagaaaatattgatcctagttcagggactcaagaagcacgtaatctctctgcaatcaatacaaattggtatacaacattagtctgtttgattcgctcttcttcagaagaagaatttgatcaagtaatctcttcatattcaacatttttagatcaaaatggttggtcagatattgaggcaattagaaacgagaaaattgctgagaataaagagaaattaggcatcgaataaaaaggtggtagtcagtaatgaaacaaatatttaatattgatggtgaagtatacagtttcctacaaaaaatatatcaaatgatgctattaaatctattaatcatcttttctagtttgccaatcatcacagtgccttgtgcattgattactggctaccagcttttaaaagaatacaatcagcaagaagttaccctaacaaaatacttcatgctgtttagaaaaaatctgattctttcattcaggttaatcatcgctttctgggtgatctttttcttactgtttcttttactagcattcactagaagaactatatttcaatttttgatattactttttattgcattttttattgtgtttctttcgaatgtattcattgtttgtaccagccaaatgtccattcggtccatagtggagttttcattagggataacgttaaaatacgtaggttgtaatattattggcttagcgataatgcttagtagttttgttttacctgtgtttttacctagattagcattagtatgggcgttatttggaataagtattcctatggtttttcaagttatgatccataagcaaattatgaagcatgtaactacaaatcaaatagaacaggagtgatccattgagttttgaatattacacgacaacagatgaaatgaatatgtttcagcttgaacaatctccgtttacacaaaataaaaatgagtttgaaatcaatgtcaatagccatcaaacttttcagaaaattgatggatggggaacttctttgacagattcttctgcatatttagttgataaatgcttatctgaagagcaacaaatcgcagtcatggaagcgttatttgattcaaaaaaaggaatcggtctttcaattctacgaaacccaatgggtgcatctgactatgcgaggcatatttatagttatgatgatatggaaaaagatcaaacagatgagaatctgattcatttttctatcgcacaagatgaagaaagtatcattcccctaacaaaatatgctaagaaaatgaatcctgaactaaaattatttatgtctccttggagtgctcctggatggatgaaagattctcaacaaatgattggtggaaaattgttgttgaagtattatgatacatatgctcattacttcaaaaaagtgattgacagttatcatatgcatggattagatatatatgcgattacaccacaaaatgaaccgttgtttgtgccaccgaattacccaggaatggagatgctggcggatgaacaagcaacttttgttgctaaatacttaaaacctttgtttaatgataataacattcggacaaaaatattaggctatgatcataactgggatagaattgattatccattagaaattttggataaggcagaagcggcctttgatggcatagcttggcactggtatggtggtaatgtaattaatcaatcaagagttgctctattttatccagataaagaaatccattttactgagggatctggaggagattggataccagcctttgaaccagctttcagtaatctaatgagaacagggatcaacatttttagaaatggtgcaaaatctatgacgctttggaatttagcgctagacgaaaataatggacctactgttccgggatttggaaaaagtacttgtcgcggccttgtaaaagtggatcaacaaacgaaaaactatgaattgacacttgattattttggtctggctcatttcagtaaatttgtccgccctgaatctgttcgaattgaaagctcgaatgatcggcatatccaaagtgttgcctttcagaataataataaatccattgttgttattttgtttaacgatagtgaaaaggatgcatctgttaagataacgatagatacttattcaatggatacaatctatttgtcagcgaaaactgcgatgacgattagagaaatatctaataacgaggagtaggcggaaaatgatctgtttgaatcgttatgtttctaaaaatcatgatgcggaaaatgggaaaatcgtctttgctggttcttctttaatggaagaatttcctttggaacaattgtttctcgataaagaaataattgtttataaccgcggaattagtggagcaacttctaaagactatcttgaaatttttgatcgattgatactctctatacaacctgtacatctattgatcaatattgggtcaaatgatctagcagacgagtgttttgaggatagtcacttattagatagctaccgccaaattttcagtaaattgaagaaaagtctaccacaatgtgcagttacttttattaagttttatccagtaaataccggaataatgcaagacgtttcaaaaaaacaaggcgagcaatggctactgcaggcttcaaagtatagaatcaatagccgtgtgattgaagcaagtgagaaaatcagcaagcttgccgattcaaatggatatgagacgattgaagtcaataatttgcttatagatgaaactaaacagcttgatgctttgaataccaaagatggcatacatttaacagaagctgcatatagaaaaattttccctttgatatatcaacatgtggatttagtacgaaaggtgaataaagaagcatcggatggtaagaaatgaccattcgatgcttctttttatgaaacacattccaatctatgtaacaggttgatttgaaagcgatttctataggaatgtccttcaaacttacctataataaacctaccgataaaaaagcaaaggagtatcatcaatgaaagaaaaaatgatggatgcgatgcagaagttttcaaaagccatgtttgtaccggttctgattttgccaattgctgggatcttgattgccattggcaatgtttttaccaatgttcgtttgatcgaacgttttccatttttggataacccaatcaccacaggttttggcagcattctctctgcctcacttttaccgatcttaacgaatctcggcatcatattttgtgtagggatcgctcttggtctggccaaaaagaaaaaggcggaagcggcgtttactgcattactaggctatctggtgtttttatatgccatgaacaaatttatggaacttcgagggatgcttgtagccgccgatgcactccaaggatcaggacaagcactggttttaggggttcaagtcttagatatgggggtatttttagggatcatcttagggatcatcgttgcattgatccacaaccgtttcatcgacactaccttcaataatgcttttcaagtctatggcggggctcgctttgtcttcattgttttgattccagttgttgtattgttcgccatcctttcttcgatcgtatggccggtgattcaaacggggattgatggattaggcggcattattcaagaaacaggaaacttcggtatcttcttatacgggacgctagaaagattattgattccaactggactccatcatttgatctatacaccatttctatatacttcccttggaggcgtcgctgaagttgggggccaagtcttcgaaggggctcggaacatttactttgcagaaattgcggatccggcagtaaaggttctctcgcaaagtgtcatctgggatgcacgaggaatttcaaaaatgtttggcttacttggtgcctgtctagctatgtatcagaccgcaaaaccagagaatagagtcaaggtcaaagctattttgatcccagcagtggtgacttcctttattgctggggtaacggaaccgatcgaattttcgtttatgttcgttgcaccagttttgttcgtgatccattccgcattaagtggactgagtatggttgcattgaatatttttggctcaagagcgattggtccgaatggctttattgatttccttttgtataacttgccgttagggattgaaaagactcgctggcccatctatatcgccgttggcatagtatttttctttctctattatgctcttttccgctttttgattaccaaaatgaatttgaaaacagtcggtcgggaagatgaagggaatgaaacaaaattgtattcaaaaaaagagtacaaagagaaacggttagcaggagctggtgttggagtgacggcagaagtaatcccttcatctgtaccaacggactcgatttcagcattgatcacgaaaggtttaggtggagacagtaatattaaaacgattgacaactgttacacacgattgcgtttgaaactaaaaaatccagaactagtggatgagacattgctaaaagaagaaacccaagccaaaggcgttatcaagaatggtgagaatatccatgttgtttatggattgactgtaccaaaagtacgagaagaattagaaaagtttcttggacgagaaggagagattgaatgatgaagaatttttcagtagtgattgccggtggaggaagtaccttcacaccagggatcgtgatgatgctgttagataatcaaaaccgcttcccattgagaaagctgacactttatgataatgatgaagcgcgacaaagaactttaggtgaagcattgacgatcttattaaaagaacaggcaccacagatcgaattttcttatacgacggatccgcaagcagcttttactggtgctgatttttgtatggctcatattcgagtaggcaaatatgacatgcgggaaaaagacgagaaggttcctctacgccatggtgtgttcggtcaagagacttgcggacctggcggtatcgcttatggtatgcgcagtatcaccggaatgttggaaatcattgattatatggagacgtattcgccagattgctggatgttaaattattcgaatccggcagcgattgtagcagaagcctgtcgtgtgttgcgacctgacgcaaaagtgttgaatatttgcgatatgccagtgggcaccttgcgacggatgtcgcaaattattgataaaaatccagcagacttagaagttcgttattttggcttgaatcattttggctggtggaccagcatcaaggacaaagaaggcaacgaatacatccaacaaatcagggaatatgttgcacagaatggctatctcactcaagttgaagtggacacccaacatacagatcctagttggcaagaaacccacaaaaaagccaaagatcttttggctctgacaccagagtatttgccaaatacgtatttaaaatattacttatacccagattacgtttatgatcatatgaaagagcatcccgaatatacgcgttcgaatgaggtcatggaaggaagagaaaagcgagtcttcgaccatgcgaaaaaaatcatcgaacaaggatcggcagagggtatcgcatttgaaatcgatgctcatgcaacctttattgtggatctggcacgagcaattgcgttcaatacgcatgaacgaatggtcatgattgttgagaataacggggcaatcgctaactttcctgatgatgccatggtggaagttccttgtattgttggctctgatggaccagaagctttggcacaaggcaagataccatctttccaacaagccttgatgttccaacaagtcactgtggaaaaattagtggtggaggcatatgtggaaaagagttaccaaaaaatgtggcaggcgttaaccctttccaaaaccattcctagcgcaaaagtagccaaagatctcttagatgatctggtctcagaaaatggtgattattggccgggactccactaaaatgtttcacatgctgagaaacatttctgatcaaaagatttcactttgaaaaaccttacaacaattagtgttcgctaaaaagtctgaggatgacagaggagatagaggatctgaatgataaacgagagggagtgcatctgtggtgcagtagttgatggctgcaagctggatgtttgccaaccctcttgtcaatcattcggatttttttgctggaatcactgacattctaaatgtttatcaagaattcaaagggagatgagcaatggtctttttgcggggatcttttttaagtatgctaaaatagaaatgaattagcagagataagggagcgagaggaatgtttttagggattgatattggaacgacggcaataaaaatcggtttgttggaagaacggaaaatcatttatcaacgttcttttcctatttataccaaaacagaaaaaggtcgcacacagtctgcgtcagaaattatagctgtacttttgaaagggatcacggagattccctcctctttacgagagcaaataacagtgattgggttcagtacagcgatgcatagtctaatgccagtgataaatgagaaatttgaagaaatctatatttggtcagataatcaggctagccaagtgattgcagagtttcgtcaatcctcattgtcagaatcgttttatcggcagactgggacaccgatccatgcgatgtcgccatttgctaagttgcttcacttcaaatccgctggcggttttgatggcaagacaaaatggtatgggctgaaagaattggtgatgcttttatttaccggagctccttggatcgaccgaagtactgcatcggcaacaggcctctactcccttgaagaaaaaaattggagtcaagagattcttcactatttggacctttccattgaacagtttgcgccaatctgtgacacgaccgatcggtttcctattgctgcgtccgctgccgctcgctatggattgaatgaaacagtagagatcatgtgcggcgccagtgatggctgtttggcggcttatgcagggtatgtatcgactggaatcaaaaatagtttgacgatcggcactagtgctgctgttcgaaaggtgacggatcaaccggtgttcgatcagcggcaaaatttttgttattaccttaaagaaggtcagtatgtcattggtgctccgtcgaataatggggggtgcgtccttgcttggatcaaagaaacattggcacaagatcctgacactttctatgaaagtctcccaagaatcattgaagaaaccacaatcggcagccatggtctgcgcttttttccgtttatcaatggggaacgggctccttattggacatctgatatcaaggcgtcttatcatggtttgacgattcaacatactcgggcagatatgattcgtggagcaattgaggggatgttgttgaatattggtgttttaaaagaaatggcagcaattaccgatgaagtgacgatcagcggtggcgttttccaatcgaaagccattgcacaattaacagctgatatcttgggcgtgacatgttatttgtcaccggcaaacgaaccaatttttggtctttatgatctttattttggtcatcgtttggcagcaagagaccacttgcagaccattacgccgaatcaaaaaacgagcgcagcctacgcgtcgctcgctgaacattattttgactagcagaaaaggttgcggctgaagtatcagcgagattgaacaacaagattgaacgacctgaaagcaactgaatggcttcatttatcgagtagatgcgaagcgggccagccagatagcaggggtgatcttagatttttttggctattccatatgttgaagccccggactcttttagttgatttcggcagtaaatgcctctacgaggtactccattagcagtaaaagctttccgtaaaaactcgtatattggatgttctgtgtatcatatggtcgttcatcagtgacaccaaaagaaaaatttgctagttgatgggctcggtgttcaccattgccgcagaaaaggacagtggggatttgatggtcattcgctagttgcattttttctagcactttctgtgtctcccccgatttagaaatcgtgatcagcatactgatgttgtcgatattattactaatgataccgccggaatcagaagcactcaccagtaaagttttaataccattaaccaacatttttttatgaaggtattctgctatgataccagaaaagccagtggcataaatggtaatgaatttatcattgttttgagcataaatttctttgatcgcatcaatagaggctgcaatgccttctgtgttgatctgatagtcaatggctgcttcagtggtcatttgacgattcagccgattttttaagaaataaagtaattccaaatagccggaaaaacctaatttttgtgctaatcgcaccagtgttgctggagaagtataaagctcttgcgcgatttttcgcaaagggacgccttcgattttgtccgtatgagacaccaaataagtgaggatgtgctgctcgctttcggaaattttttttcctttggtcaatacatttaagtccatgctattgctccttttcgtggtaatatcatcatacaatgaagagaaacagaaagtaaaacttttttctttatcctttttttaaacaaccttcttataccgtcttcgcaagagatgatggataagtttggttgtttatttcattataagagattataatttcttatatagaaaaaacaaaggtggaatacaaatgacgaaaccctatgggactgttttgattaaagccgcgaaaatcatggattatcttgcggaagaacccaacaaatcgttgcaagagattgcagctgctacagacttaaccaattcaaccgcgttaaagattctcgaaacattacagctgatcggctatgttgcaaaggacaagcaaaaagaataccgcttaggatctaaactcgtcaaatatgccaataaaaatattcaagaacttgacttggtagagatcagtctgccatttttggaagaattgcaggaaaaagccgatgagaccatccatttgggggttttgacagcgaatgaaatcttgtatgtcaataaactggaacctcaaaatcaaactattcgcatgtcgtcgaaggtgggaatttcaagacctttatatagctcagcgatggggaaagctgtattggcagaattcgatgagacaagctatgaagcttatttagatgaaacacctttacaaccttatactgagaacaccatcacgaatgttcttaaattaaatcaagagttaagagaagtgcgtcagctgaagatcgcttttgatgatgaagaaatggagaaagagattttttgtatcggcgcggctcttttgaaagatgaggaaattgtcggtgctttctcagtcagtctgccaaaataccgattgaccgagagctataaacaaacattgcttcaagaaatacgtgccacaaaagataaaatcgaagcagccatttgaaatacttttggaaaccccttgcaaaagaaaaaagaccaggtataataaagataagatttctttataataaaacttaatttccaaataggaaattaagaacggaggggtttatgaaaaaagtagagcgattatcaaagttaaaagcctgtggaatcgttgcagtcgttcgaggcaccacaaggcaagaagcgctggaagctagtcgtgccatcgtccgaggcggtattaaaggaattgaattgaccttcacggttccgcaagctgctgaagtgattgcagagttagtcaatgactatcaagaggaccaagaagtgatcataggagctggcacggtacttgacgcagtgactgcccgcttagcgattatggctggcgcagaatatatcgtcagtccgacatttgatcgcgatacagctgagatttgtaatttgtatcaagtaccttatttgccaggctgtatgacgatcactgaaatgaaagaagccttgaaatcaggcgcagacatcatcaagctgtttccaggaagtgcctatggtcctagtatcatttccgctttcaaagcaccattgccccaattgaatattatgcctactggcggagtcagcttggaaaatatgtctgagtggttcaatgccggagtggtcgctgttggtgtcggtggtaatttgttagcgccagctgctagtggtgatttcgagaaagtgacagcggttgcttcacaatatgtggccaagttaaatgacattcgaggtaactgagatgactagaattattaccttaggcgagattatgttgcgcttatcgactagttctggtgtacgcttggagcaaagcggacgttttgctgcacactatggcggtggtgaagcaaatgttgctatctctttagctaactatgggcacgacgtctcttttgcaagtaaagtcccggcaaatgatctcggaaaagctgttacccatcatttacgcaattacggagtggattgcagtctgcttctaagcggtggtccccggctgggaacttactatatggaatctggagtaggagaacgtgcagcaaaagtcatttatgaccgtgcagggtcaagttttgcggaaatcaagaccaatgaatggtcagaagcgatctttaaagatgtcgcacttttccatgtatccggcattacaccagcgttatccgagacgtggcgggatttgaccctttcacttgttaagcgtgcgaaaaaagcaggttgcaaaatcagtttcgatatcaattatcgtggcaaactgtggacgacaaatgaagccgccgcctttctaaaggaaatccttcctttggtcgattattgttcggcgggcaagttggatgcacaagtttttatggagattccagcctatacagggcaaggaaatgagttgctgtattattaccaacaaatgaaccagcgttatccgaatattgaactgttttattcgacaaaacgagaagtgctttccgccagtgctaatacattgatgggtactctttggaataacggccaatatgcaacttctcaagaacaccgcatcgatcctattgttgatcgagtaggcggaggggatgctttttgtgcaggcgtcctgcatggcattctaagtgggtattcctctcaggaaaccattgactttgctaccgcagcatctgcattaaagcacacgattcatggagattgtaatcaatttacagaagcggaagtagctgaatttttagcagccggatctggaaaaatcattcgctaggaggaaccagcatgcaagaaatggaaacccgttatacacacagcccagcagatattcgacactatagtaccgaacaattacgcaatgaatttttggtagagaaaatttttgtacccggaacgatccagttgacttatacccataatgatcgcatgatctttggcggagtaacgcctacggatcaaccattagagattcaattgagcaaagagttaggcgtagaatactttttggaacgccgtgaactaggtgtgatcaatattggcggtgcaggaaccattgaaattgacggcaccaaagaagacatgaaaaagcaagacggatactatatcggaaaagaaacgaaacatgtagtcttttcttcaaaagatccaaatgatccggcgaaattctatgtatccagtgtaccggcacatcataaatacccgaatgtaaaaatcagtatcgatcaggtcaaaccaatggaaacaggtgaaggcttgacgctgaatgaacggaagatttatcagtatattcatccgaatgtgtgtgaaagttgccagctgcaaatggggtatacgatcttagaaccaggtagcgcttggaatacgatgccttgtcatacccatgaacgccgtatggaagcctatgtttattttgatttcgccaatgaggacacaaaagttttccatatgatgggtaaaccagatgaaaccaaacatttagtagtcgcagaagagcaagcagtcatttccccaagttggtcgatccattctggagtcggaacaagcaactattcctttatttgggcaatgtgcggggagaacatcacatacacagatatggacatggttcccatggatgagttgaaataataaaagaaagaaggatgaagatggatttttcaatggatcactttcgtttagatggcaagattgcattagttaccggcgcagtttatgggattggctttacgatcgcccaatctttggcagcagctggtgcaacgatcgtctttaataatttaacacaagaatcagtcgatgaaggcttaaaaaattatcaagcagccggcatcaaagcccatggctatgtctgtgatgtcaccgatgaagcagcagtcaatgaaatggtcaaaaccatagaggaagaagtaggtgtcattgatatcttagtcaacaatgcagggatcatcaaacggattccaatgttggagatgtcagccgctgatttccgtcaggtagttgatgttgatttgaatgcgccattcatcgtttctaaagccgttttgccttccatgatcaaaaaaggacatggcaaaattatcaatatttgttctatgatgagtgaacttggccgcgaaaccgttgctggttatgcagctgctaaaggtgggcttaaaatgctaaccaaaaacatttgttctgagtttggtgaagcaaacattcagtgtaacggcattggccctggttatatcgcgacaccgcaaactgcaccattaagagagatccaaccagacggatctcgtcatccctttgatcagttcattgtggcaaaaacgccagcagcgcgttggggagagcccgtagacttagccggtcctgctgtcttcttggcttctgacgcttctaattttgtcaacggacatgttctctatgtggacggtggtattttggcttatattggcaaacagcctgagtaatcctcctaagttcctgatttctaaaacaggcgaacttagcaatcaaaaaagctcctattcttcgcacatcctcaatggattttgcaaagagtaggggttttctttgtcgaattttccgataaaaaaatgaatggaagaacctcttctctgagaaggcggatcgtggttctagccaagttcgatcaagaagaaggggggagccgcttactaaagaaccaacagttagttttcttgcagctttgctctagtttttttctttatttgataaattttttagactattcaattgtcagtggatatgagtaaataaattaggggttctatcgattttccactaaatcaattgatagaaagaacaaattaaattaggaggattaagatgaaaaaatggtttctagtagcaatgctatttatttgtagtgtctttgttagtacgcaaaaggcagctgcccaaacggagggctcgatcacagattcctcttattatcgcaacgctttaaccgagaagattcctgcagataatgcttttattatgagaaatggtgaatcaaccacgatagaaaaagtgtctggagtcgtgaatagtgaaagaatagttactgggattaattctgtaaaagagagcgctgctctgataagaaatgttgggtattatcaagggcatccggtcaatgtcaaggtgactgtcaagatgttggaaccttcaggtgcggatatgcttatcacgaaaaacgaatttctaagattgaaaatatgggcaaatggtacatcagaaatcacctatgaatttttagacgataagatgcagccaattcaactaaagacgacttttaatgaaatgggtttgaacaaatggaaagacatacggattcctcaggctgctactgccatagaacatatctttgctgcccccgattccacgatccaatacagcgaagacgagcaaggcactttgacgttaaaaggacaaggaaacgcagataattggtcagatgatgcttgtaaactggcaatcacaacaaaatctatctcgaagtttcagtttattgtcaaaaataatgactcaagatcttctatcgctgggatatctgaattaaagtatttatccgtttttttcccagcagttgaatttccttatgcctatccacaaacactagccactcagaacatcgaaaacaatgaagtgatcactcgtttccaacaaacagttccttacactgaaacaaacaattctcgaacaactttatcttacagaatcgaaaatccagatcaaaatcagtttcaattaaaaggagtcgagatcaaagatttttctggaacggatcgaacaaattggtttgaccagaccatcgatgatgaggggaatttgcttgttcatgcaaaagcttctacactaaaaaaccgggccttttatgacaatagttatcagtttatcattcaccacaccttcactggaagtgcagaacaaccggtcgatcctgcactgatcgagaatgactgttttcaacttcaaccaattctttatgaagatattggtgatggtgaacagttaatcggaaaactttctgcgtccatttactactataacgaagtgaagatcaattttgttgatgaaaacaatcaaccgctcttagattcgggggaaatcagagggctgatcccccattctgttgatttatcttcgttctatcccaccattactgggtactatccgatccgagaagaaaaagaccacatcattgtcatgccaggttctcaagaagttttccatcattacaaaaaaggtgtcccactactctttacattaaaagaccgacaacaaagaatcgtgattccacgcttttctaaagaagtcaagttatcttatgacttttcccatgacagccatcaaagcgtccaagttgttgcccaatatggagagaaaaaacaggtgctaagaaactatgatgtgggaaatacacaaacggaagactcggtcgttttcgaagtaccagaagaatggcttaataaagaggtaaaattatatctagagaataaagagggggatcaatcagcagcagaaactcgcgtgtttgttcctgagtcaggaccaaggctgcaagtgccggcagtcttatcttttggaacacaccctattccagcttttaatcagtatctttttgctgaaagtcagccaatcaaagtggaagataacagtcgcttagaaaaaagcaaatggacagtgaaagtaaaaatcgatacgccgcttaaaaacagtcagcaacaagagctgcgagatgcgctgatttttgttgataaaacaggggatattctcttgtcggacaaagcacagccggtctgggaaggcagtggatccgccacattagctgagaatcgattgaagctgttattgcgaccaacggatcatgtcggggagtatcacggctcgctggtttggatgtttgaagatgcgcctcagtaaaaaaattttctatccgtaaagttcaaccttttttcataataaaacaaagtaagaaacaagcccttaattcactaaggctgcggcattcacatagctgaaataaacaagcaacgtgtttttctccctgtggaaacacgttgcttgttgttgattggtaaacaaagaattctaaccgaattacagcaatatctcactgctgagagaaagattcgcttctttgattgcttgacaaatcaagcgagcaacgattaaagccccttgatcattcaagtgagtattgtcactgataccttcgggataattcggatattcgttttttgaaagatgcaaaaaatactggcgagcttgcctagttgcaaatgtggaaaaatagttttgcgtcatcgtgaatatatccagacaaggaatctcaaaggcagcagcaaaatctctcatagcttctggataaggtcacgcggctaggtgatccaagtcattatgctgatggaacttcaagcgagtgatagaagtcagtaaaactggatttgcttgcttttttgtgcaacagcaataaactgtgttaaattttcttgatgttcttttggcgtcgttcctcgttcaggatctgttttctggtcgttgtggccaaaccgaatcaagaaatagtctccgggtataagctgctcgtcggctgctaagaggcgtttttcttgaatgaagcttttggttgaacgtccattcatagctaaattaatgaccgtaacctctggggagaggaaggttggtatttttcaccccagccagtttccgaacgcttgtcaatcattttagttgcagcagttgaatcaccggcaataattagtttaatcatcatccacctctaaaaatcaaaataatccgctgcattttggtaacagatgccttcaacaaattcttttaactgtctggtatcacttggtgcttcgccgcgaagaatgagttctcccaaccattcacaaaaaactcttcggaaatattcatgtctggtatacgaaagaaaactacgggaatcagtcagcataccaacaaaatttgctaacacgctaccatctgcaaacttcgtcaattgccgacgcatgccggcacgggtatcgttgtaccaccagccagaaccgagttgaagtttgttgttgccttctttttgataacagcccatcagcgctaccagcacatcataatcatttggattcaatgaatacaaaatcgtttgcggaagagcctctttcctctccgcagcatccagtaatgcttgaagtgggctagtgatcggctgatcgttgatgccgtcataacctgtgtcaggtcccaattgattgagcatattcgtgttgcagtttctataagcatgaagatgcagttgtattgtccagccatggttgtgatattgttcaaataaatgaagcaagagggcagagcgatagactgctgcttctgcttctgtaatgatttcctgatttctcgctttttcaaagatagcttgaggagacacgctgttttctaggaaatgcaagtggtccaatgcgtgatcggataagcgacaattcatttggtgaaaaaaagtaattcggcagtcaagtgctgttaacaagtcttcatagctatcgatcctgtggccaacaactgttgctaattgatcgatatagtggttaaacccactttgttggatatttaaggctttatcaggacgaaaggttggtaatacccgaaagcggctttcttcgttagccaatttgcgatgaaatgctagtgaatctgtcggatcatcggtagtacaaatgagttgcacattgctgttggcgatgatttctcttctgctaaaggtctttgattgcaatttttggttgacgatttgccagatttctggcgcgttttcttcattaatcataagatcgacaccaaagaaacgttttaactccaagtgggtccagacgtaaagggggttgccgataattttaggaactgtctggcaccaagcaataaatttgtcataatccgctgcttcgccagtaatcaacgattcatctactccacatgcccgcatcaaccgccatttgtagtggtcaccggccaaccaagcttcggtgatatttcggaaaggatgatcatcataaatctcttggggatctaaatggcagtggtagtcaatgataggcattttcttggcgtattgatgatacaaatctttggcaaagtcattcgttagtaaaaaatcatcatttaaaaacattggcttcctcttttcttcgtttataaagtgacaccattcttgaagatggcgatttctcgaacattatttgcttcattacgggttttggtcccactagcgaccgcaatgatcgcttgaataaaatcagcgagaacgtcttccattggttcatataataaccgacctgcattgaaatccatccaatggggtttcttctcgaataattcttggttggtggcaactttcatcgtagggacaaaggcaccaaagggggttcctcgtcctgtcgtaaataagaccaactgacaatcagccgaagcgagagcagaagcagccactaggtcattaccaggtccttcaagaagactgagaccgctttcgcggattttatctccgtatttcaagacgtcgacgaccgcagaggtgccggatttttgcgtgcagcctaaagacttatcttccaatgtggtgattccacccgctttattgcctggagaaggattctcataaacaggttcgccatacgaaagaaaataatctttaaagtcattgatcagatgaagaatcttttcaaaagttgcttggtctttggcacgagacatcaatacttgctcggcaccaaacatttccggtacttccgtcaacacagtgctgccaccttgagaaaccaagaaatctgaaaatgctcctaataacggattggcagtgataccagaaaatccatctgagccgccgcattttaagccaacttttaactcactcaacggaacgtcttcacgtcgatcatctttggctgcttgcagcaattcgtgcaataatgcttcaccagcttcgatttcatcttggctttcttgagcgactaagaatttgacacgatctgtgtcataatcacctagcttttctttaaattcagcgaccgtattgttctcacatccgagtccgaaaacaagcacccctccagcatttgggtgttgcacagcatcaatcaaaatttgccgggtgttttggtgatcttgccctaattgcgaacacccataaggatgtttgagaatcgtgaccgagtcaaaggttcctaagttgggatgactttgtttgaaattttcgacgatgatctcagcgattccattgatacagcccactgtgggtatgacatacaaatcattacgaatcccgactttgccattttttctccggtagcctttaaaagtcaattgactttttggatacactactggttgtaggttcggctcataggtataagccagcgttcctgaaagattggtcttgacattgtgggtatgtagccactgtccagcttttacatcggacaaaagatgaccaatagggtaaccatacttgatgacgtgatcgcctttattcaaatcaataagtgcgatcttgtgaccttgaggaatctcctctgtaaaactataggatcgcccttcaaatgtaagctgtgtctctttcgtgattgcatgcagagcaaccgcaacattgtcttttggatgcaatttgagaaaatcgcttttgttttttatttctgtcataatcattccgcctttttttgagtcggctcattttttaatgagtcaacgaggtgtcgagaacccttgtttgaaagtagcactaccatttttgaaacttctttgttgaacacgctcaagtccactccccataacttttcttgtcctagaataaaactgacttgttcagaagagtcgagggcccgtgccttttcaaagagagctagcacagcttcatcgtcttgacaatcggtcgttaaatacaagtaaatcagtccggctaatgatgcaaggattcttggcggcagtaactgttgctgatgatgacggagcaacaacggcaagagacgtgctttaaattttgagacgctattcaaggcgatcgactgcagttgatgataaacataaggatttttaaaccgttctttgatctgttccgcatactggatcaattcttcttgcggcaggtctagcataggaatcagttcttcattgaacagctcatcaatgaagcatgtaaaatcaggatcaagcatcacctcttcaaccgttgccaaaccagctagaagggccagagggaccatggctgtatgagggccattcaaaagatgcaccttccgttcacgatagggggttaggtcttcagtaaagattacattcaaactcgcagctggcaatggaagtttctgagatacggtatgcgatgggtcttcgatcactcacaacatgaatggttcggcagtgaccatcaaacggtcctcatacccgtgtaattgattcaactcctctgcttttgattgggggtagccaggaacgattcgatcgactaaactacagcagaaagtgttttcattttctaaccaagtatgaaagctgtcctctagttgccacagtgagcaatattgttggatacacgcttttaatttttctccatttcgatcgatcaactcacagggaatgatcgtgtaacctgatttattcgcttggtatcgttgatagagcagcgcagttaatttagccggaaaactttttggcggcatatctgtccgtttatcttgaggatcaaaggcaattcctgcttcagtcgtattggaaacaatgatgtccaagtcatcaatttcagctagagctaaataatcctgccattgttcatagggattcaatacgcggctaatcgtcgtgatgatctcagaggtttggacaggacggccgtctgctaatccttctaaaattaccgtatacaaatggttctgctccgccaatagagatcctagaccttgttgaattggttggactactacagcgctgccattgaagagaccttgcttattcatctgctgtagctgccagttaaaaaagcctcgcataaagtttccttcgccgaattgaatcactttttccgacttgcgagtaggatgagtcatttcagttatttttttcattgtaacctccaatattcattgatttataatgaacgtctgccattttgcacacgttaacatttttggcaacagccaaaagcattcaagaagcgaatgctagagggaatctctgattgttagttctgtatctaaaaggtattgtttttgtgaaacagaaccgttgattgaatctagaagcagttgtgccccaagctgactcatttcaaaaacgggcttgctaatggttgtcaacgggggattcgtatattttgaaaacgggacattgtcaaatccaataatggcgatatcggcagggattgcaaggccatattcaagacaagtgttgattgcgccaatggccatgtcatcgttggaacagaaaatcacttctggcggctctgcaagttccagtaattgtttggcacattttcgaccgctctcgatagaatagtctccagtgacagcgtattctgttggaaacgctagcccgtgctcagtaagagcccgcatgaaacctttcttacgctctatactggaacgaaaagttggcttgccttcaatgatcgcaactttcttatagcctaactgaatcgcgtagtcaatggcttgataaacgccttgctcatcattgcttgtgacatttaaaaatgatggcttatcaatttgccgattgagaacgaccaccggcaaatctaagtgactgatttcttcgatgaaagtgtcatcttgatcgctttgactcataacgatgatgccatccatccttggcaagtcctcaactggactggtgagggtcgtcatatcgtggaccgctaagcgatactctggcggtagggtggtattgatccccttgatcacttcaaccaaaaagcgatccgatgtacctgccgacaaattagaaaagtaaaggccaataatatacgacttctgattgactagacttttggcattgacattcggcgtataatttaaagaacgcgcaatgtcaccaattttcttttttgtggctggcttgattagtggactgtcatttaacgctcttgaaaccgtggtatgggagacgcctgcgatttttgcaatatctttaatagtgaccatatgtatccctcgactttctcattggttttagcatatatcctaaagagaggaatgtcaatatatcaataatgcacacgttaacttttttctttgaacctgtattcacaagaaattttttatgctagaatggacatatcttaagaaatgattctgtcagtaattacaggagaaatctcatgaaaagggtagggctaatcagaaacattcaacctttttttataacattttccttccagtttctataattggaagcgttttaataatagcgtttggaagtttcatttatcatcgcacgtataaggatattcagaaaacattggtccaaaatcagcaaaatttcgttcagcaagtcaaaggaaatctcgatcaaaaaattaagatcgctttaaaggatttgcacagctgtgcaaactagccttttaatagaacctttaaagaaggaaggggaaaagaatggaaattagtattgacatcaacgattatttaaatgaaaagtcagtgacagcaacaatccaagggtatatcgatcagcttcatcaggcaggaggagggaggctgatgtttgcctcgggtgtgtatccaacaagttcactgatgttaaaaagtaatgttgaactccatctacaaccgggagctgttcttcgattctcggatgatcccaaagagtatccagtggtggtttcgcgttgggaaggggtgaaacgggaagtctatgcttcttgtatctatgccgacggtgccgaaaatattgcaatcacaggttttggcacgatagatggtcaaggtcagaaatggtgggatgtctttcgcaatcatccagagcagctagaatatccgcgaccaaaactgatcagttttgattcctgtcagcaaatcacattgcgagatgttagtttggttaattctcctagctggacagtcaatccaatcttatgccaagacatcactgtggataatattaagatcaaaaatcctgcagactcgccaaatactgatggcattgatccggagtcttgcaaaaatgttcgtatcagcaattgtttgatcgatgtaggggatgattgtattgccattaaatcaggaacagaagagacaaaagaacgcgtttcctgtgaaaatatcacgatcagcaactgtcaaatgctccatggtcatggtggggtcgttttaggaagcgaaatgagcggagatattcgcaatgtgaccatctcaaattgtatattccaagacaccgatcgcggcattcgtttgaaatctcgtagaggacgcggcggggttattgaggatattcgagtgaacaacctaattatggacaatgtgatttgcccatttacgctgaatttgtattatttttgtggtcccaaaggaaaagaaaagtatgtttgggataaaaatctttacccaatctctgaggagactcctcagtttaggagaattcattttgccaatatctccgcgcgaaatgttcatgctgctgctggttttatttatggtttatctgaacaattcatttcagatatctcgtttcatgaagtagcaatttccatggcaaaagagcccatacccggaaaaccagctatgatgactggaatggaagagatgaccagtcaagggttctatattggctgtgctaaaaatgttcattttgaccgtttagaattagtcgatgttgaacatgccttccatatcgagaatagtcaggggattgaagttgaccgttcccaagaaaatggtaagcctctcgtgcttcatggtgatttttcgtgaaacagcggcaaacgttgcaaaggtttggatcatttcatagaaaggaaccaatagttcttgtaagaaagttcttttatgagaaaacgattgtctcgaaaagtttttgttagaactcaattaacaagaaccagtgtcggcttatttttgcctatccttatgagaaaaagctagtgccttttgttcttttcaaccactctcatggaggcagtttttctattggcaaagaagaattacgcagtagtagtcattatttgtagccagaaagttttctagaaacattgatcgctgagggctatgcagttggagcaatcgatatttgggaatttggtgagagaaaacatggtgaaagtacggtgttttaaaattttagttcataggacaaaccactctggaccaccatactcaacaacaatcaacagttttgaatctacaataatgcgtattgatggatcagaaagtaaatcagatataaaaacggctggcagcctagagggggcttgccagccgttttatatcgtctgtgttttataagaacttattatattagagaagtcaactacgccaaaaaggtttccgaaaaaacaattatcaagccgaaagtggtaaaataatgcgaatgctgcttaatttcaataagaaaggatttttgaaatggaaattaaatttttgcaaaaagatcaaccaaactggttggcttatgcggatcaaattgccagcgtcgattggaaagctgctacatttgtagcaaataagatgcgtcagagaagctataacgactgggaaggcgtttttgtggctgttgcccacaatcaattagctggattttgtacgatcgtcaaagaggatattgtccctcttcaagtcgctccttttattgcgaccgtgtatgttgctcccagctatcgcggcaatcatcttagtcagcaattggtatctgctgcagaacggcgcttgcatcagatcggttttgatacgatctatattgtcactcagctgacaggtttgtatgaaaaattgggctatcaacaaattgagacagccaccgatcgcttcgggagaaggatgcgtgttttggcaaaaaatgaagaattctgctagtcaagcaaatctctttacttactttaagttagtgttattattaaagtaacaagtcatccattcgagatgagaaaaggagcagaaacaatgacggtgattattccagaatttcaacttcatgaacagactcaaattgggaaagttgtcttaaaagtagccaacttagaaaaaatgattgctttttatactcaagtgatcggactatcattgatcgaaaaaaatcagcagacagctcgcttaggtacgacagagaaaatactgcttgaattgatcaaagtcgaaaatccattgcctctcacaaggaaaacaggactgtttcatgtcgctttccttttgccgactcgcaaagatttaggcaatacactgatccattatttgcaaagcaatgcaccgatcgatggcgccagtgatcatggctacagcgaagcattgtacttaacagatcccgaggggaatgggattgaagtgtatcgtgataaaccaaaatctgaatgggatattcgagaagatggcgaaattgttggaatcacaaaagaaatggatgcagagggggttgtcgcagcagcagacagccaacaatcaagtttccccacaggtactattgtgggacatgtacatttaaaagttgctgatttagcccagacagaaactttttatacccaagtcgtaggactgagcttaaaaaataattttgggaaccaagcaaaattttttgcggcaggagattatcatcaccacattggctcgaatacttggatgggcaaaggtgtgactcctatggcagacaatgatctaggattggcttattatacctttgtgctcccagacaaagaagcctttgagtcattgctcacgcatcttgagaaggaaaatgtatcctttactcttgaatcaagtaggcgtttggctttattggatccaaatggtatccaagtcaaaatggaatactaggtaaaaatgatagcttttgatgtttttgaatccttgatagcagtttcagtctaaagacggatggggaaagatcggctttatgagatacttggcatatcaaaaaaggagtgcaggaacatgaaatggtggcatctgatgaatacgctatgggtttcattgattttaactagtttgctggtactatttgttcaagacccatttatgactaattatggcatcgatccaatggcgaaatttgcttacttggcattgattggtattcttgcgattggattatatggcgtccaatccgtctggaaacatcaattaatgaaagtatcaatgacaaaaaaataagcggggacccgtcagcgggtccttttttgtttttgaaagtcagttgcggatgtgaagcaaaaaataccttttagatgatagtttgccgggcagcaagttttgtgcacattgatgaggggtgactggcgggtttgacaaaatagatgccagtaaaaagtatcagggctgtgcggactgattccagcacaaccccatgaaaatcaggagatatctatgatctgataagaaaagccattgaccgttaaaaagttgaatacatccttggtagcaaggaagatcgtcttggtatttgtattaggatggaaactcattcgtggttttttagtgatttcgcgctcaaagaaaatctgaatatctcgctctggattgtttaagagcccaaatatggagacaacgccaggtggtaagtgcatttttttccacaaaagatcaggagaagctaatttgactcgtgattcaccagtgatttctttgagcagatttagatcaagccgtttttgatcgtccattattaggagataataggcggtcttttttttattggttaaaaacatcgattttgttcgaaccccatcaattccagcaataaagctatctgcttccgcagttgtacttgcaggcgggtgttcgatcacttcaaaggaaatgttcaagtcggtcagtcttgcagcaacagattcaaaaggatccaatacgatcaactcctagtctcttttttattactatatcataagtataagttttaaaatgcctattcaatcgcatgaaagatagagagagtaacaaaaaagcagcgtagctgctagtgtaggtcgttaggtcgttaactttagtgatcgaaatctgaaaacagatctgaaaaaatttctcataaagaattgaggagcaaagagatttcgtcatgcgcatggatcgagcgtctgtcagtgagcagaagctgctttttacaggctgattctgccattagttgtcaaaataaccccatttgcttgataaagagcaagtaagcgtctcgttaccaaattatttttccaaagattcataagcagaaagttactgagattcttcggctgcaagtttgagaccaaatttagagatcacccacagtagaacagcagcaatcagggtaccaacaaatccaaaaaacatgtctaggggatcgggggtattcataacgcctaataccgtttcgcttaataaattggcaatcagcaagaaaatagtcaatccgagagtataggtgaatttgacgcccatcaataaccaaaaataccctagcagaccaatgatcaagctaatagagaaattggaaatgtgtaaataaaagtcggggtaaatcgctgtaaaaaaggttatatctagatattttgataaataggcaaatagtgccaaaaaaatcagtagtaaatagagtaaagatgcccaaacttttgggtaataatgtagctttatttgatttttcaatatgaactcctgtaatcgattgattggctcaaagccgtagctattgtactgggatagttagggattgttaataaaaaacgcagctagtgtgttttttatttgtttatagtcttttgtaacaaaatagttggctgggacattgatgatcggcagatcattttcgttgtcaaacgggacaaatggatcaggtacaaccaaataatccacttggtctttatcgcggaaataattgattgagacatcataatcattggcgaaataattcttaagctcagaataatctgcaaaaaagaacgctggtgacaatgtggtataactgagcccattacttgcagtcaaaacgaaacagatttttttcatcttatttctccttttttatgattttattcgtacgtatatgttaagggggtgatcgatgagaatggtgtaaaaatactaaaggatcaagaaagtgtcctgcacgtatttaccaaacaatgtttaaaccaaaacagctcggttgtctgtgtctttttatagacaagttcattcttttttactggtcaatcgagtgctgttaattagtgagacctgactaacgacggtctaaatgaaaagcaattatttgctgactctagtttcttttttttggtttcttttatcatagagaagtttgagcaactcatagagagccgtgagtactgcaatgcaaaaaagtaaagtcgtatatctgataagaaaaattagattgaaccataatccgtagaccatcggcataaccacgatcaagcaaagatacaattcgatttttcggcgtctcctcaattgcagccatcgttcatcagacatgttctcgctcctttgatcaagatagaatttccatgcaatcttctatgtgtttgactcaacgtatagacaaatagaagaaatacttagaaacagtataaccgaaaatgacaaaaccacataactaggacggcaatttcgtcctagttgtgtctttgtcatagatttataaataacaattgcataaaactaattgaactggaaatacaaaaaaagcaaattaccgaagtaatttgccggtacgatgcagacgatgggatttgaacccacacgagctaagctcacacgcccctcaagcgtgcgtgtctgccgttccaccacgtctgcttattgtttttgtatactgacagctgattgcagccatcacgtctaaaaaacatgttaccgattatcttcacgtttgtcaatgctattttagggatttataaaaggacatttttcttgctttttattgaaaaaaaatatttaagtggcagaatctggtataatgagaaaataactttggagctttaaggagattgataaatgaactactttaaaaatctgctggctaaatcgattcggcagcgccgttttttgtttacgatgatagcagcgttcttgattggtgtggggctcgctttttatcttacattcatggaaccagtgaatgtacaggcagaaatcactatgcaaaaagcgcaagcattacggcttgtagacaattatcagaattatccaaatgaatctcaggacaagcaagaaacctatcaactgctgctggcaaacaacacattatctaatcggcaagcctcgaatctaatcatggaagaatttcctcgtttcaatcggaccagtgaagagattgcaaaaattcagctgcaattatgggaaaccgctttaccagataaagcctttttaccatctatctggcaattgcagcaaaataaagtgatagcagcgcaattagaagaacaggaaaaagctccttttcttactgttgacaatgcgcagactgctgttgcgttgactattcaagtgttattgggatttggctttttattcctggcattttttgctagcgataatttgctggaagaaaagcgccatttttctctgatccattcctatccacaagtcttccctataaggatgatcagtaaagtcggggtaaagatgattggtcatctggcaacgatcagcctgttgcttctaggaatcactgcggccatgtcggtgatcggacgatggggggattggcactatccaacggctgtctattatcatcatacttggcatgccgtacctttctggcaatactttctattggtactcgtgcttttgacaagtttgattattgtgacagaattactgggctttgtggccaatgttttgattccaaatcgctatgtttctttttttctcctttgtctttgctatggtctcggtacaatagctagtacaccattcagtaaatattccccttttgctgtttttgatttgcaaaagatcctcacaggtgagtttgcagtcagatcgcaatcgacagtcgggttagggacagctttcatccttcttttcttatggggggtgggagcggtcgccttcttgttgatcgcagataagaaaaactggctagcgaaaggagtcatataatgaaaaattattttctctttgaactacagcaattaatcaaaagtaaaaaaacgatcgggctatggtgcttgttagtaatcgttgctggcgtatacagttttcgtgatcgcacctatcggccaattgagcgaatagacaaaaatgaaattgaacagcggtatttgactagacaatcctttttggatgaacaagcagaaaatccctcagatcattggtccgccgccatggcagtagcgatgttcgagccatggaatcaagcagatagcttacgattaacttccctagctgccaatgattggcaaaagtatgccaaagcaacgagccaatggtatcagctgagtctccaatataccgatgatgaaacaattttcttcacgcctgactattatacttatcagaactattatgcggcttatgatgggaaatacggctatgcctccactgcaaaatggatggaaagtgccagccaattaccaaacaaaaagctttccaagtatgtgttggaacaaaaaacgggtatccaatctgttcagcgggcatttacgaattacttgccgtttctctttcttggcgtgacgatctttttggcaatcgatagtctgaccaaggatcgtcgacacaaaagcttattcttatctttgccggtgacggtagatgagattctttgggcgaagacagcggcactgtttattgtgtcaacactgatgatgatcagtacactcgttttgatttggatcggtgtcggctgccaattcggctttggctcattggacctacccgtcagtatcttgtcttcatcctttgatgcccgttatcctatttcttctgccgatgttttttatacacgccctgttggagttttcttacttcagtgtatgggggtaggaatcttgctgcaattgatctatatccgaggcattcttttgctgagcacactttggcgctcagaattagccaatctctttcttgctggttttggcttgattagtccacttatttttcagagacgctggtttagtgcattcttggataaatcaaatgatgcctatttgtatcaaaattatggtcagatcctttcaggattcagccgtttttattttgggtcctctgagtttgtccttgcgaaaggactgctgctttttggtgtagtgtggctgctgatcgagatcggtctttttgttcgtgtacagcagaagcaatttaagcttgtttaggaggtttggaaatgttagcaatgaaaaacgtaactgtgacatttaaacgaaatgttttggatgatttaacgttggcctttcatcctggagaaatcgtcggcttagtggcgccgaacggtactggaaaatcaacactactcaatgtattgatgaattttgttcagccgactagtggggagatctttctcgatcaaacacagctttacacgtccaagaagtcagaaatggcagctcaccagaaaatctcttttttccctgatcagaacgatctatataatgatctcagcggattagaacatttaaaactttatcaacgaatgtggcgatcagaggaagcgctgattgatcaaaccgtgaatcaattaagaatgactgactatatcaagcggccggttggaacctattcgttggggatgcgtcaaagactgtgttttgcgatgcagatcgtgacagacacgccctatatgttgatggacgaagtcatgaatgggttggatccgaccaatgtggaattgatttctaacgttttaaaagggttgcgggagaaaaagaaatcgatcctgattgcttcccatattttgaccaatttggatagttatgcagatcgcgttttgtttttgaaagatggcaagattatccatgaatacctgggaaagaattctttaatagatgaaccaatttatttaaaagcaaaagatccagagtttttggtttcatttcccgaattaacaacattgacaatcgatcttcaagaacaggtctatttaatcgaaatcagtgatcctcagctgccgaaacgctttattgaagctggttttacagaattttcaattggccatctcgcattagctgaacgctatttaaaattctttccagagaatgactgaacaaaaacgaatgaacggctaggcaataaaagagcgttcattcgtttcttttagaaaagaatttatttaaaagtcgtaaagttctgtcaatttgaccgttttttttctaaactttttgctataataaatgcaatcttttaaaaaagaatatcactagaaccaaggtaatttgcattgattctactgtcaaaggagaattcgaatgagaaaatttgaaaagtcatcaaaactagaaggcgtaagttatgatgtccggggaccagtcctagaagaagcagaacggatgcaagaagaaggcatcagcatcttgaaattgaatacaggtaatccggcaccatttggttttgaagcgccaaatgagatcgtccgtgacttgattatgaatgtgcgggagtctgaaggctactctgattctaaaggaattttttcagcccgcaaagccatcgagcaatattatcaattacaaaagtttccaaatgtgacgatcaatgatatttataccggaaatggtgtatcagaactgatcaccatgtgtatgcaagggctatgtaataatggcgatgaagtgttggtgccgatgcctgattatcctttatggacggcatcgatctctttagctggtggaaaacctgtacactacatttgcgatgaacaatctgactggaacccagatattgaagatattcgttcaaaaatcacaagtaaaacgaaagccatcgtgatcatcaaccctaataatcctacaggtgctgtctatccaaaagaagtattgcagcaaattgttgatgtggctcgcgaccatgacttgattattttttctgacgaaatttatgatcggttagtgatggatgattatgttcacgtcccaatcgctacattagctccggatcgctttgttgtgactcttggtggattgtctaaatcacatcgtgtagccggattccgggttggctggatggtccttagcggggataagagaaacgttaaagattatattgagggcttgaatatgctttcctctatgaggctttgttcaaatgttctttctcagcagatcattcagacagcgttaggtggctatcaaagttcggatgaactgctgcttccaggaggaaggatctatgagcaaagagagtatatttatcaagcattgaatgacattcctggtttatcagctgttaaacctaaagcggcattttatattttccctaagatcgatgtcaaacgcttcaatattaagaatgatgaacagtttgtgttggattttctgcatgagcaccatgtgctattagtgcacgggggcggatttaattggcaagaaccagatcatttccgaatcgtttatttaccgaatatggatgatttgaaagcaacgaccgaaaagatgcgggagtttttagccacttatcagcaaaaataagtaagcaatagtaggaatgaacaatagtaaaaaaaacgaacagttggctccttatcctgtaccttgtagcaaggcatcggaccagatccaactgctcgtttttttgattgatcgaatatcttaaaatcatagcgcttattgcatatgcttagtcagcagtctgctgacatttttttttactgatgatcattcgatcattgaatttttccagcatttcttcgctagggtctgtcacttgcacaagaaccgaattttcatattctctttcgacttttcctgcatagaccttgccttcccaagtgaaggtaatggtgctgttaatcgtcatagaaacacctcgttttaaattgttaaaaaataccaagatattgttggaattgctttcctttttgctattatgtgctaaaatgaagaaaattaaaaatgcgaattcgcattttttttaatgttgaaaaagttggaggagagtcatggcaaattcacaagaatcctttggccaaatcattcgcacgttccgcaaaaagcgcaagatgacacaaaagatgttggcagaagatatctgttcacaaagtgttttgagccggatcgaaaataatgaagaattaccgaatgtattggtcatgcatcaaatctgtcaacgattaggcgttaccttagatcaagtaatgatgctccatgctgaagagatcaatcgaacgaatcaagtgttcgctcaaatggaaagccattttgttcataaagagtaccaagagttattgaccaaactgcaggataaaacgatcatggactatctatatttggacgcagacatgcaaatgtactattactttttagggagttgcgaatatttcttgttccaagattatgaagcagcgattgaaagccttaaaaaaggcttatcctactcttatcagcaagataaaatcaatatctctgtgatggagattcgactcttaagttgtatggggcgagtgtataatgatatgcagcaattagaagaagcacgttttcatctagaaaaaagttaccatggggtgcaagtgctgccggcagaacggatgaccacaaccttgaccaaagtattctacaactatgcagtttttttagcgaaacaagaagaattcaccactgctttacaaattctagaagaaggtatcgatcttgccagagaaaagaacagtttctattttttagaagaattatttgaactgaaaggccatgtctttgtcgctcttgacaatcagcaagcagccgatgaaagttttgctctttatcaagcggtcgtcgatattcgaaattcatcgagaaatggtgtagacctttcttgacttcttactcaaataagagtaattttaaggaagaaaagaaataaggagcgatcaagatgaaaacatatatttatgcggacaaattctttttgaagtcagctgttcatggggcaggttatctggagatcattgacggcaaatttggcgatatcgtcaatgaagtaccggaagatgcggaagtaactgattattctgggcaatggatagctccaggactcgtagatacccatatccatgggttcatgaaccacgatgtcatggacaacgatgcagaagggatcaaagctatgtcagaaggcttattgtcttgtggtgtaacttctttcttgccgacgacattgacttccagcaaagaacgtctaagagatgtagcagaaactgtcggacaagtgaaagattctgttaccggtgcgaaaatccaagggatttattttgaaggacctttctttactgaagaacacaaaggtgctcaaaatccaatctattttggtgatccagacatcgatacattccacgaatggcaggaagcttctggtgggattatcaaaaaaattgccttagctcctgaacgtaaaggcgttaccgattttgtgtctcaagtgacagaagaaggtgttgtggttgccttaggtcatagtaatgggactttacaggaagctgaagctgctgttgaagcaggagccagtgtttttgttcatgcctataacggaatgagaggactaaatcaccgtgaaccagggatggtaggagcattgctatcattaaaagaagtattctctgaattgatctgtgatggacatcatgttcatccgcaagcggctgagatcttgatggaaaaagccgggcatgaccatgttgctttgatcaccgactgtatgatggcaggaggtatgccggatggagattatattcttggagaattccctgttgtcgtaaaagatggaacagctcgtctaaaagaaggaaacttggccggaagtattttgaaattaaaagaagccatcaaaaatgttgttgagtgggagattgctaccccgcaagaagcaatcatgatggcaagtctagtgccagcaatcagttgtaaaatcgacgacaaatgcggcatgatcaagaaaggtcgggcagctgactttatcgtgttggaccctcaaatgaatctgcaagcgacatttttagatggtgtttgccggtacgaagcttaagcagaaaaaagacacagatcgccaatttggtgatctgtgctttttttgtaaaaacgtttaattgttttatcgatttcatcaatagctggaaggtagatcaaatttttcttgcccaacaaaagaaaacagcaaaaacgccttcctcacaagctgtcttgatacgtgaaaagctaagtagtgagagggcgtttatttttgttcttgctgcttggagatttcttcttgaacatcttccagcatagttttcaattccgtttctctttccttcaatacaaccaagtcttctttgatttctgcttgtttttctttttcgggaggcctcaagacaaaattgatgaagatcgcaatcagcgtaccaataaaagtgtctaacacgcgatctaatgcaaaaataaaagactctccttgtggaacactaagagtgatcaataacatcgtagcaatcccagaaataataccggaattattattgatcccatccgaaagaacgataatgaaggccactaaagcagggagcaccaataactcgatcaaaaaatcattgtggaaatattgtttcatgaagaagtagatgatggcagtagccccaccaatcgaatttcctaaaactcgtgatttcccaaaagaaagggtcgttgttaaatcttgacgtagtgagaagacagcggaaagggcagcgatcaaaggctgtccgcgattcaaaaatcgaaacagcaagatacacaacatgacagcaattgcggtttttatcgttcgcatccctagacgaaagcggccaaattgcatgatcgatttcctccttttctttaatcataaccaaaataaccgataaattctagtgaaatccttttttgtttagtatactttgaaaggaggtgcagaatgaaaattggaatgagaacagtcaagacagcgattgcttcgggtttatcgatggcagtggctcaagcgattgggttattatatgcgccagccgcagggatcattgcgattttgagcgtaggcaacacaaagaaaacatcgctttatacgggcattggacgcttgatctcactggcactggcgacaattctggcattttgcagtttttcgcttctcggatataatccattagggtttgtgctctttttgtttttgttcatcccaatggctgtccgtttttcattgacagatggcatcgtggtcaattcagtcttagtaacgcactatttactggaagaatcctttgcttggcgcttgatcgtcaatgaattcttgctcatgattctcggagttggctttgcattagtatttaatctttatatgccagatggagaaaaagaactgaaagaattgcagcaagaaacagaaaagacgtttaaaagacttttaaaagatatgtctgaacacttaaatcaaccttctcgattgaccttgcaagggcaatgtcaatcattattggcaaagattcgacaaggacaagaaaaagcacaggttcatcaagaaaaccaatggagccaaaagaatagttactatgaagcgtattttgcgatgcggcgtgcgcaagttcgtttgttgacagaaatgattggtctcttgcgatccatttgggtagaagaagtttatacagagaaatttcgtgccttgctgctgtataccgcagaaacatttgatgaagctaacgacggcgaagaccttttgctaaggatcgaagagttgtatcaagattatcgacaaaaaccgctgcctagaaatcgcgaggagtttgaaaatcgcgcgcaattgtttcaatttttgcagtcgtttaaacgttttattgaaatcaaagccgaatttgctgaacgggatcattaagaaaaggaaagaatacgactgcccagcgatttgattcgctgggcagtcaattgttttattttgtttgcttccaaaattgttgcatctggtctaagacggcaatgacgtcgcttgttagatggatcgatcctttagaagtcccttcaatagttttaatcatattggcgatttcgtaatttagtgcttgggtcgtatcgcctgtttcaataaactcattggagccatcacgatagtggatggttgctttatcagcccgcggatattcttcgactgtgatatagccttcttcaaaagcaacgattcctgtttttggcattttagcttggaaagttagggtcacactggccatttcatcagctgggttacgcaaaatcgtcacggattgttcatcaacgccggtttcaaaaggcttcatgctgctgaattctacctttggtgactcactcatgaaaaagcgggcaaaagagacggcataagtaccaatgtcaagcagtgcaccgccgcctaaatcaggattgaaaaaacgattttgaggatcaggatccttgtaactgccaaaaggtgcttgaatcatttttaattttcctagtttgccagaggctacgatttcttttagacggtgataaagcggcatgttgtagatggtcatcgcctcttctaaaaccaatcctttttctttggctaaggccagttcttcagcaagttcatcgccacttgtagtgatcgctttttcgcaaagaacgtgtttccctgctgccagtgctgccatgatgtagtgatggtggatatcatttggtaccgcaatatagacgatatcgatcgatggatcagccaacattgcttcagcagattcataagcctgaggaatcgagaaacgttccgcaaatgctttgacttttgagtaacggcgggcacagacaccgtacaaatcgctagcatcgcttgcaaatccagcggcaaattgtgtggcgatgtctccaaggccaattatgccccaacgatattttttcattttctatcagctccttcgtttttagtataacaaaacttagtgaatcttaaaaatattgcaaagccaaagttaaaagttccatttatgtccagctttcagtaaaatagatacaggagggatgtatgatgcataacgtgtctattgcaattattttaagtacagttattgaacaatattctacggaagctcgtttctatgaaacgcagcttggaatcgatcgagaacaatgggaggcctggaaaaatgggacagcgagtttgacacctgctgaaaatcagaaaatcaaattgctgttctctgattatgaatggatgctgattcaaaaaattgttcgtcaaacggtgatctatcccgaaaagagaacaagtgcggtagctgaattcaagaaaatgaagacacagattgcacgcacgtggctttcaaatgatttggcaaaagtggaattattaacacaatctgaagaaagtacccaataccttgatttaagagtcagtattacgtatgatgaatggggctatgacgacattttgaacttccgtctgcctgcttttgtccaacaacaaatcaagaatgagaaaattgagttgttggcatgggtcaaagagaatttagaagagacatataattaaaggtagggtttttttgaaaaaatatttaggtatcttagctgctgctggctttctattaattagtttggtagctagtctgcagcaggaacattcagcgagcagcgaaacaatcgcaagtagtcagacagtggcgtctagcagtgaaaaagaacaagcaagagcctctcagaagagtaaagattttcccaaagtatctttagatgattgggcgcttgttttagtgggccccttgaataaaggaactgaaatcgatacggggggattagcaaaattaaccaatggctatctcgtggacaaacgaatcgtttctgactatgaaaaattaaaagctgccgcagaaaaagctggtcatcctttagtgatgatctccgcctttcgctccatcgcctcgcaaaaggctgtttttgatcagaatgtcacgatgctgatgagtcaaggacaaagcaaagagaaggcaatcgaaacaaccaaacgaacgatgacagaaccaggttacagtgaacaccatacgggtttagccgtagacgtagttgatcgacaatggtatgattcttatccagaaaccgtattggaccaccgatttggtgagacagatggcggcaagtggctgcaagagcatgcccgggaatacggctttatcattcgttacccagaaggaaagcaggccattactcagatcgattatgaaccttggcatttacgctatgttggtgtagaaactgttacatatattgaaaaacatcaactgactctggaagaatttctagagcaagtaaaagaacaggaggaagaaaatgagtaaacgacgcaaaacaacgaagactcgactgccgtttgtctttttaggtatcctcctgattgggcttgcttttattttttcaatgaacagtttagccgatcccttgccgaaacaagaggatagtgaagaaatgactcagcaagaatttattgatcgcattgcacctcatgcacaggaattgcaaaaggggtacggtattttaccgagcattattttagggcaagccatcttggagtctgattggggcaaaagtacactagctagtgaatacaataatctttttggaatcaaagcatttggacatagtaaaaaagtgacattagatacccaagagttttataatgagcagtgggtaacgatccaaggcgattttcgagtctatgattcgtgggaagagtccatggatgaccacacgatgctctttgtcaatggcgtagactggaatccagcgctctatgtaaatgttttgtcggcaacagactacaaaacagctgccaaagcattgcaagaagctggttatgccacagatccggattatgcagagaaaatcattcgtgtaattgaaacctatcatttaaatcaatacgaccaatagacggaaagaagtgggtgcccatggaagaaaaatacatgccaaagatcacaacggaactgcgaaaagatatcgtgaaagttcctaaagttatcagacaagcaagcgggattcaaatttttggcaaacagatccgctcgatcatttttactacagatattgcaatcatccgcaataccaatgcagatgcggtgattgccgtctatccctttaccccgcaccctgcgattaccaaagcgattatcgaggcagctgatattcccgtattttcgggggtcggaggaggtttgactcaaggatttcgttcttcttatatgagcatgtttgcagaagcgcaaggttccattggtgtggtgctaaatggtccgacaccactgaaaactgtggagcaggtctgtaaggtcattgatattcctgtgatcagtaccgtaactagtaaatataccaaaattgatgaaaaattgaagttaggtgtcaaagtgatcaatatcagtgctgggaaaaaaaccgctgagactgttcgttattttcgcgagcggtatcctgaattgccaatcatcgctactggaggccctacagatgaaagtattttagaaacgatcgaagcaggcgccaatgcaatcacctatacaccaccttccaatggagagttattcagcaaaaaaatgcagcactatcgggaaatggaaaaacctgattagtgagcattgagaaataaaatgagaacattcttattttggaagagttttctaaacttgcctttttaatcaatcttcggcataatcgaacctatcattcataaaatttaacttgtatatcgtcgtaataaggtcgacagtctctacccgataccgtaaatatcggactataagtaaaaaaagtgccattgatgcaccttttttgctttagcaaaaaaggtgtttttttgttgataggcctaaatggaaaggaaagaggtataggatgaaaaagttgatcgaacggatcgaaaaagacggaaatgttttaggtgatggcgttctgaaagttgatagttttttaacgcaccaagtggatccggaattaatgcaggaaatcggcacgacatttgccaaacgatttcaagcagagcagattactaaagtagtgactatcgaagcttcagggattgcaccagctttatttacggcacaaacattaggtgtgccaatgatttttgcccgtaaagccaaaagtctgacaatggacgaagaattattgacagcctcggtttattcctttaccaagcaagtcacgagtcaagtatcgatttctcggaaatttttgtctgcggaagacaatgtattgatcatcgatgactttttagcaaatggccaagcagcaaaaggattgatcgaattgtgccagcaagccggtgcaacggttgctggtatcggaatcgtcattgaaaaatccttccaatctggacgagcattgcttgaagaaatgtcgattcctgttgtttctctcgcgcggatcgcttccttatccgagggtaaagcaactttcttggagggtgacgcttaatgaacgaacaaaatggacgctctgctgtcttagggttgcagcacttgctcgcgatgtatgcgggtgctgtcgcagtaccactattgattggaaccgggttaggatttaatgaagcccaaatgacttatttgatttccattgatatttttatgtgcggggtagcaacattgctgcaattgacagtcacccgtttcttcgggatcggattgccggttgtcttgggctgtgccatccaagctgtttcaccattgattttgatcggaactaagtcagggatcggtgccatttatggagccattattgcttctggtatttttgttgttttgatctccggtgtcttctcaaaaatcaaagtcttgtttccgccattggttacgggaactgtcattacagtgattggtttgacgttgatccccgttgccattaccaaaatcggtggtggggatgctgccgcagcttcctttggcacaccagacaatttactcttaggttttgtcacgattgcattaattattggtattcagatttttgccaaaggatttcttcgttcgattgctgttttgatcggtttgatcggcggaactttgttagcagctgtcttagggttagttgatttatccgcgatttctcacgcgcctgtctttcatttgccgcagccgttttactttgggttaccaacctttgatatttggtcgattttattgatgatcattatttcaatcgttagtatggtggagtctacgggggtctattttgcactgggagatattacaggacaacctgtttcatcagaatcattgaaaaaaggttatcgggctgaaggattagcagtgattctgggcggaatcttcaacacattcccttatacgggcttctcacaaaatgtagggctcgtacagttatctggtatcaaaacccgtaaaccgatttatttctctgcggtctttttgattatattaggtttgtttccgaaagttggtgctttggcgcaaatcattcctgaagctgtattgggtggcgggatgttagtcatgttcggcatggtggctgtccaagggatgaaaatgttgtcgaaagtcgactattcaaatgacaaaaatttgctgattatcgctgtttcactgggattcggtttagggttcaacattatgccaactttatttagccgcttacctgaaaccttgcaaatgtttactggtaacggaattgttatgagcagcatgactgcgattatcttgaatcttttattcaatggcttaccaaaaaaagaagcggtcgaatcaggagaatttagcgaagtttgatttacgaaagcattctggtcaacaggatgctttttttgttttagagagaagaaatgatcttttgttaaaagacgaacaatatatctcatattttttctatagttcgattttcttttgactttatggatgtcacttgctagtatttaagtgaataatcgaagggagttgtcttatggaacaagtagcagtcattatgggcagtacgtcggattgggagacgatgaaacacagttgtgagattttagaggagcttgggattccctatatcaaaaaggttgtttcggctcatcggacaccggacttgatgttttcctttgccgaaaatgcaagagaaaaagggctgaaagtaatcattgctggtgctggcggtgccgctcatctgccaggtatggtcgctgcaaaaacaacgttacccgtgattggcgtacccgtccaatcacgaacattaaatggattggattcgttactttccatcgtacagatgccgggaggcgttcctgtggcaacgacagcgattggaaaagctggtgcaatcaacgcgggactacttgcagctcagatgctttccatgtatgatttaggaatagcggaaaagttggatcaacgaagaaagacgttgaaagaaaaagtagtggaaagtagtgatcaacttgattaaacctttgatgcccaatgcgacgatcggaatcgttggcggcggacaattggggcgtatgatggcaatgagtgccaaaaaaatgggtttccgtgtcggcgtgctggatccaacagccaattgtccgacagcacaagtagctgactggcatattgttgctgcttatgacgatgtctttgcactggaagaaatggcgcggcgttctgatgtgattacttatgaatttgagaatgtcagcgtagaggctttgaattcgattttgccctatgcaaatattcctcagggaactgatctattggcaatcacccaagatcgcttgttagaaaaatcttttttagaagccaataatattgttattgcaccttatgcgacaatcatcagtcctaccgatattcaagatgccatcgagagtatcggctatccttgtgtattgaaaacgactcgaggaggctatgatggcaaagggcaatatgttttatacagcacagctgatttagcgccttcgatgaatcttttgcgggaaggaacttgtgaattagaagcatggatcccttacgaaaaagaactctcgatcatggtggctgggaatggtcgtgaaatcaccactttcccagtggttgaaaatatccaccgcaacaatatcttgcatcaaacgattgcacctgctcgaatcgatgctgaggtagcggaggaagcagaacggatcgcgcgtgtgattgcgcaagcccttgatttacgcggtgttttagcgatcgagctgttcttaacgaaaagcggcggactatatgtgaatgagttggcaccacgcccacataattcaggtcattactcgattgaagcttgttctatgagccagtttgatgcccatgtacgtgggatctgcggttggccgcttgcagaggttaaactgttgagtgatgcggtcatggtgaacatcttaggtgatgaactcattgaaacatatgacctgattgctcataagccagattggcaattccattattatggcaaagaagaagcaaagagcggtcggaaaatgggacacattacgttgttgaccgaagacattactgcttcattggaagaaatctatcaaacgaatatttgggattaaaggagagtaacgcatgttagaacgttatacaagacctgagatgggcaaaatttggacagatcaaaatcgataccaagcatggctagaagtcgaaatcttagctgatgaggcgtgggccgagcttggtgagattcccaaagaagatgtggaaaaaattagagagaaggcaactttcgatatcgaccgtatcttagagattgaagcacagacgcgccatgatgtggtcgcattcacccgggctgtctctgaatcgcttggtgacgaaagtaagtgggtccactatgggctgacttctactgatgtggtagatacggcttatggttacttgatgaagcaagcgaatgacttaatccgtaaagatctagaaacattcacagctatcattggtgaaaaagcaaaagaacacaaatatactgtcatgatgggacggacccatggggtgcatgccgaaccgacgacatttgggttgaagcttgccttgtggtattctgaaatgaaacgcaatattgaacgtttcgaacgagcggcggctggagttgaagctgggaaaatcagcggtgcagtaggaacatttgccaacattccgccatttgttgaagaatatgtatgtaacaagttggggattcgtcctcaagaaatctctacgcaagtgttgccgcgagatctccatgcagaatattttgcttccatggcactgattgcaacaagcattgaaaaatttgcgacagaaatccgtggattgcaaaaatcagaaacaagagaagttgaagagttttttgctaaagggcaaaaagggtcttccgcaatgccgcacaaacgcaatcctattggttcagaaaatatggcgggattagcacgagtgatccgcggccatatggtgacggcgtatgaaaatgtttctctttggcatgaacgagatatctctcactcttctgctgaacggattattatcccggatacaacgattttgattgattatatgctcaatcgttttggaacgatcgtcaaaaatctgactgttttcccagaaaatatgaaacgtaatatgaatgcgacttttggcttgatctatagtcaacgtgttatgttgaaattgatcgatcatggcatgactcgagaacaggcatatgatcttgttcagccgaagacggcacaagcttgggacgaacagcgggattttcgaccattgttagaagctgaccaaaccattatgtctacgttaagtgaaaaagacttggatgatgcatttgattatcatcatcatttaaagcaagtggatacgatttttgcgcgcgtaggtttaggtgaatagggaataaacccaaaaaaaacaaaaggcacgctgcttcagtaagcagcgtgccttttggggtagttttattatttagttatagttttcggaaagataagacaaaagatctggggctaatgctgtagcagaagagttttcttgccgatcttctagcatggacaccatcaaatacttttgattctgggcatcgaaagcaaataagaagctattttcctgtcctttctcatcttgtttctccttgatctcagctgttccagttttggcagcaagaggcaaaccgagagctgctagggaatgggctgtcccattctcatcggtaacgacagctttcaaatcctcattgatcagtgaaatcgtctctggtgaaatcaactcttttttcgtctttgtttctgcacccatcactaatcgtggataaaccagagatccttgattggcgaaaacagagtacatcgctgcttgttgaattggattgatcaacaattctccctggccatagccagtgtctgccagcaaaatctcagaattgaaggatttgtcattgctgatttgtgcagggttcatggcaatcggcaagtccaattcttcaccgaaaataaatttctccaaaccagcacggaatttgtcttcacccatcgccaatgtttgttgagccatatagatattatccgaatagacgagagcgttacgcaagttaacggatgcgacatcgctgacccgagtcacgaagtaatctccccaagagctatctttttgccatttcaatccgttgattgaaaggacggtttctggattgatcgttccattgtctaaaccgatggctgctgtgattgttttaaaggttgaaccgggagcataaccagttgcaaagcggctgataaatggtagatctttgttgttatggtaagcatcatagtcctcttgtgaaattccgttggtcattttattgggatcaaaacttggagaactagctagaacgagcagatcccctgtggttggttcagtgaccacggtagaaccagcctgatccttaagggaatcaaaagcgattttctgtgctttggcatcgatcgtgagttgaatcgttttgccgtcagtttttttcgtttcgatcaatgcttttcgctctgtgcctttttcatcggtgatcgctatcttaccaccgttttttcctcgaagttctttgtcaaaagctgcctcgagaccagagcggccaatttttccattgctggctaatgtatcatctttttcaacatcttcagccgtaatgtctcctacataaccaatcaattgtgcagcggcttcacctaatggataggttctgcccgcggtttcttgaatgcttgcaccggttgggagatcagctgtgggttccacgattttcaaaggaacaaagtaatcgtcttgcacccaagattgatccaatgcttgctggatcgctttctcagtcaggtcaaactgcttagcgatcgctttgattcttgactctttgtcctctccatctcctaattgtccgggaatcaccccaagctggtacaaggtgccattagcagccagtggtgatttgttgcgatccactatttcacctcgaacagcctcatcaacagaaatacttactttatcttgtccagccatgtcagggaaaatcaggtttggagcccaatcgatttttggctgttctttttcaaatttgatggttccggaataattcagatctttgatttcccccaagctagtagtgagagataactgatacgtaaactgataatctgcatttttgacatcgtcgcttaaagtgattttggaacccttgatgttggcagcatcaattccgctgaaaattgtttgatatttttctgctacttgatcattggtataaccatttctttctgcgctatcagaaagaatcaaggatggtaatttgtcgaatttgttttttgaaaggttctcaatgaatgagtggacgactttctctgcctgattttgtcgttgctgtttgtcataatagcgatagccgaaaaagccacctactacaagcaataagagcagaggaagaacaatcagtaaagtcttccgtttttttggtggttgattttgagagcggcgattttgtcgttccatttttcttaattcccttcttggttaagtatcggtaactcttcgcgattccgataaagcggcagcagcaagcgataatctgctaacagttgctccatagtgagcgtagaaatctgatctttgagatagactttgccaatctgtaattcgcttttttttacagtagtcagccgctctagagcagcgggccattctcggatcggctgatagccatattgcgtatgatccagagagaggacaaaatcttgaggtagagtttcaaacagtgccggtttctctgaccagcagcgagcgatttgctgttgatttttcggctgatcaatcacacttaaccagacaaaagcatactcacgagtaataccgatctggaagtgggcatccatcttataacctcgcttgtttggtccaaaagctgcccaagtttcttctggaggatagacacttcgccgtcggtgctgtgcgatatgcagataaaaaggagtgtctagcttttctgtgaaaaaagggcagactttttcaccaatttgctgaaaaatcggttggatctctttacgaatttcctgcattcgttcttccaagctcgaagcttggaagacgtgaaagcttttattagtaaataacatagagtagaattcctttcttgtattctaagagatagtatagcaaaaaaacacccttaaaatcgcaatttaggcgttttttaagagtgtgtttaactatttataaaattaggttttaaaggagtgaaagtcttttcctcattgagtaagtttagcaagacatccaaaaaggcagtttgcatttcttccatattgaaataaatacggaaacaataggtgtgtttaaagaaagtctgctgatggatttgatggataatcaattcttcgtttaatccgtttttatattggagtacccgttttcgatgttcggaataatgaggccgggcatgttttttgaatggactgaataaataaaaagatgtcatttgatttgcggtcaacacttgttgaacggcaagtagttcattatgtagctgttttctgtcggtgtccgataaatgagcgataaatcgttgcgcttgatttttcagtgaccacatgaatcaattcctccttggagataccaatattcacaaaatcaatataacatgaaaaaaaataaatgtaaacgctttatagcgtgtgaacaagtcggaaatcagcagaacaaaaaatgattttaagttaaacacgaacgtttaaagaaaaattagttgttaatgtacattattttgttgacccttattctttgcgttgttagaatagaaaacaacaagaagagactaaaaatctatgtgaaaaaactaacttttgtgaggtgtccggtggtgcaagaagaattgatttacgaagggaaagcaaagaaactcttcaagactagcaaagatgaagagctccgtgtggagtatctcgatcaggctaccgcgttgaatggattgaagaaagatgcagtttcaggaaaaggagcactgaataatcagattaccagtcttatttttcaagaattagaaaagcagggtattccaagtcattttatcaaaacattgtctaaacacgaacaattagtttgtgaagttgaaatgatcccgttggaaatcgtcgtccgtaatacggctgccggcagcttttctaagcgcctgggaattgctgaaggggagcagctgccttttccgattattgaattttattacaaagaagaccgcttagacgatcctttcatcaatgaagatcacattcgttatttgggaatcgccacccctgaggaagttgctcaaatcaaaatgcttgctcgacaaatcaacaccgcattgtgccaactctttgagaaaattaagatccacttggtcgactttaaaattgaagtcggaaaaagtgatgggaaaattcttttagcggatgagatttcgccggatacttgtcgcttatgggatctgacaacgaaagaacatttggataaagatgtctatcgtcgtgaaatcggggatctgattcctgtttatcaagaagtattaaatcgcttagaaaaggagtatagttcatgtatttagtcaaagtttatgtcacttataaagagtcggtcttggatcctcaaggagaagcagtcaaaggagcggttcatcgtttggggtatcaaaatgtctctgaaatacgtattgggaaatattttgagatcaaagttacagacagcaacaaagaatcagtagcggcagaaattgaagaagtttgtgacaagttactggcaaatgtcaatatggagacttatcgttatgaaatcattgagatggaggacaaggaacaatgaaatttgcagtaatcgtttttcctggttcgaattgtgatgtcgatttaatgtatgccatcaaagatgtgatgggcgcagaagccgaatatgtgtggcatgacgagacctcgttagctggctttgatggtgtattgcttccaggaggtttctcctacggggattaccttcgctgcggagccatcgcacgtttctcgaatattatggcagaagtcattcgttttgcagaagaaggaaaaccggtctttggtacgtgcaatggcttccagatcttgacagaagctggcttgctgccaggggttttacgcagaaatgaatcgctgcactttatttgcaagccggtacagttgcaagtcaataaccagacgccttttacctctgaataccagcaagatgaacggatcacgatccctgtcgctcatggagaaggaaattactattgcgacgatcaaacctaccaggaactggaagccaataaccagattgtcttccgttatgtggataacgttaacgggagtttacatggtattgccggcatttgcaacaaggcaggcaatgttttagggatgatgccccatcctgagcgggcaatggaagagttgcttggctcaaaggatggcaagaagttctttgcgtctttattgaaaaatttcgggaaggtgccagtacatgaataaagcgatcatagcagagccaacaccacaggaaatcaaagaaaccaagctttatcaacaatgggggctcactgatgaagaataccaaatgatttcagaagaaatattaggtcgactacctaattatacagaaacgggtctcttttcagtaatgtggagcgaacattgttcctataaaaattccaagccggtcttgcgcaaatttccaaccgaaggcccgcaagttttacaaggaccaggcgaaggagcgggaatcgtcgatattggtgatggccaagcagttgtctttaaagcagaaagtcataaccatccttcggccgtggagccttatgaaggcgccgcaaccggcgtcggtgggattattcgtgatattttcagtatgggggcgcggcccatcgcgatcctagattcgttgcgttttggcgaattgacgaatgagcggaccaaataccttttagaagaagtcgtggcaggaatcagcggctatggaaattgtatcggaatccctacagtcggtggtgaagttgccttcgatgcctgttacgaagggaatccattggtcaatgcgatgtgtgtcggtttgatcgaccacaaagatattcaaaaaggacaggccaaaggcgttggtaacataatcatgtatgtgggagcaaaaacaggtagagacgggatccatggtgcaacatttgcttccgaggagttcgtggagggagaagaacagcagcgctcggctgtccaagtaggagaccccttcatggaaaaattgttattagaagcttgtcttgagctgatccttgaacattcagacagtttgatcggtattcaggacatgggggcagccggtctcgtttcttccagttctgaaatggcttcaaaagctggttcaggattaaaactttatttagatgatgtaccgcaacgagaaactggtatgacaccttatgaaatgatgctatcagaatctcaggagcggatgctgatctgtgtgaaacaaggacatgaagcagaagttgaagcgttgtttcaaaaatacggattggaagcggtagtgattggtgaagtaaccgatgatggcgcgtatcgcttgtaccatcagggaaaagaagttgccaatttacctgttgatgctttggcagaagatgcgccaacttatcataaagaaaaagcagaacctgctagaatccaagcatttcgtcaacagcctgattttgaaccagtcattgatgatgcaacagcagtctttttacaattgttgcagcaacccacgattgcttcaaaaaaatcgatttttgaaacctatgattctcaagtgagaaccaataccgttgttggcccaggaagtgacgctgcagtcctgcggatcaaagggaccaacaaagctttagctatgaccacggactgtaatgctcgctacttgtaccttgatcctgaacgaggcggacagattgctgtagcagaagcagctcgcaatattgttgcttctgggggacgaccactagcgatcacagactgtctcaactatggctcgccggataaaccagaaggcttttgggagttatggacatcggcagaagggattgccaaagcttgtgaaattctagaaactcctgttatttcaggtaatgtttcgctgtacaatgaaaccaacgggcaggcaatctatccaacaccagtgattggtatggtagggctgattgaaaaggtcgaacatatcaccacacaacatttccagacaccggaggatttgatttatttgattggagaaacgaaggccgactttaacggcagtgaactccaaaaattacaaaatgggtcgatcaatggccgtttgatggcatttgatctattagaagaaaaacagaatcaggcaatcgtcttatctgcgatccaggctggacttgtaaaaagtgcccatgactgtgcagaaggcggattagctgttgcattagctgaatctgcgtttaagaagaatgtcggtatatctgttcaactagatttgccgcaatcttggcttttttcagaaacacaatcgcgatttgtgctgtccattgctccagaaaatcaaaccgcttttgaagctttggcaggtgatagcgcttgtctcatcggaaaagttacagcagaaccgcaactaaaaatccaaggtaacgatggaatgatcgtagtggaaacagccttagcacgtaagaaatgggaggaagcaattccatgtctattgaagtaaaaagcttgaatgaagaatgcggggtttttggtgtctggggtcacccagatgctgcccgagttacttattttggcttgcacagtttacagcatcggggacaagaaggcgctgggatcgtcgcaaatcagcaaggcaaacttgccggacatcgggatcttggcttattagcagaagttttttccgatgaacgacttcttcaacgattgacaggtgaagcagcaatcggacatgttcgctatgctactgcaggcaatggcagcgtcgataatatccaaccttttctttttaagttttttgatcagcagattgggttggcgcacaacgggaacttaaccaatgccaagagtttgcggaaatcacttgagtctgaaggagccatttttcattcaaattcagataccgaaattttgatgcatctgattcgccgcagtggtcaagcgaatttgctggatcgcatcaaagaagcgctgaatcaagtgaaaggtggatttgcatatcttttgctgacagaagatgcgatgatcgctgctcttgatccaaatggatttcggccactctcgttaggaaaaatggtcaatggtgcttatgtgattgcttcagagacttgtgctttagaagtgatcggagctgaatttgttcgagatatctgtcctggggaagttgtcattgtggatcaagcgggctaccgtgttgaaacatatacggaagaagtccaaccagcgatttgctcaatggaattcatttattttgcacgaccagattcgaatattgccggcgtcaatgtccatactgcacgaaaaaatatgggacgtaatcttgcccaagaagcaccgatcgaagcagatatggtgatcggtgtaccgaactcatccttatcggccgccagcgggtttgcagaagaatctggcattccttacgaattaggattagtcaaaaatcaatacattgcacgaacatttatccagcccactcaagaattacgggaacaaggcgttcggatgaagctatctgccgtccgcggtgtggttgaaggaaaaaaagtgatcatggtggatgactcgatcgttcgcggcactactagccgacgaatcgttcaattgttaaaagaagccggtgccaaagaagttcacgttcggattgcttcaccgccattaagatatccttgtttttacggaatcgatattcagacgcggaaagaactgatcgctgctcggcaaagtgtcgaagaaattcgccaaacgatcggtgccgattcgttggcttttctcagtgagactggcttgatcgaagcaatcgggttagatttagatgccccctattctggattgtgcatggcctatttcaatggtgattatcctacaccgctttatgattatgaagaaagctatttagcgtcgctcgaataaatggtacaggaggaactcaaagtggcaaatgcttatgcaaaggctggtgttgatgtgaacgccgggtatgaagtcgttgatcgaatcaaaaaacatgtcaaaagaacagaacggttaggtgtaatgggtgccatcggtggctttggcggctgttttgatttgtcaaactatccgctgaaagaaccagtgctggtatccggtactgatggtgtaggaacgaaattattagtagcgatccaacaaaatcaacaccaaacgattggaatcgattgtgttgcgatgtgtgtcaatgatattgtcgctcaaggagcagaaccgatctattttttggattatgtcgcagtgggcaagaatgatcccgaaaaaatcgaacaaattatcgccggggttgcagagggctgcgttcagtcgggagcggctctgataggcggtgaaacagcagaaatgccagggatgtactcggaagaggactatgacttggctggttttgcggtgggaattgttgaaaaatctcgtctgatcacgggagcatcgattgaaccgggacattttctgatcgggctgcctgcttctggtatccattcaaacgggtattcattggttcgcaagatcttttttgaacagcaaggttttcaaatggcagagaagttgccggaattaggcggaaaaactctcggagaagaattgttaacaccaacgagaatctacgtatccgctgtactgccgttacttgaaaaacaattaattgacggtatctcgcatatcacgggtggcggctttatcgagaatattccccggatgttgccgccgcagacaacagcagaaatcacactgggaacgtggccgcaactgccgatttttgaggctctagcttcttatggaaaaatcccggcccatgaaatgtatgagatcttcaatatggggattgggatggttcttgctgttgcaccagagaagaaagaacaagtgctagctttgttaaacgagcagaatgaagcagcttacgttattggtaaagtaacggaggctcaagaacatgcggttcttttacaaggagatccgctatgaggatcgctgtttttgcatcaggaaacggcagtaattttaccgcaattgccgatgcgattagagaagaagaactcaaaggggctacattagcgctgctgttctcagataatcccgccgcatttgtcttggaacgtgctaaagacgcgggggtagcgacattgcagttatccccgcagaaatttccttcgaaagcagcgttcgaagccgcactgttgaacgagttggcggaacattcgattgagctgatcgttttggcaggctatatgcggatcgttggacctacgttgctagccgcttttcccaatagaatcatcaatctgcatccctcattgctgcctagtttttctggaaaatccggtattgccgatgcctttcattatggagtgaaggtgactgggatcaccattcattacgttgacagtggtatcgatacggggccgatcattgcgcaagaagtggtacgtatcgaatcggaagatacattagaaagcttagaagcaaagatccatcatttagagcatcgagtctatccagcggtcatagctgaaatcattcataaaggagaccatcaatcgtgaaaaaaagagcgttgatcagtgtgtcagataaacaagagatcgtgtcttttgccaaaaatttagtacaaaacggctacgaaatcatttcgacaggagggacaaaatctgctttggaagcggctggtcttgaaccgattgcgatagaaacggttacaggatttcccgaaatgatggacggacgtgtcaaaacattgcatccaaagatccacggtggtttgctgggtcgccgggacctgcctgaacatttagcagcaatggaaaaacatgacattgcgccgatcgatctggttgttgtcaacctttatccttttaaggaaacgattgcccaagcggatgtgacagaagagcaagccattgagaatatcgatatcggtggaccaagcatgctgcgctccgctgcaaaaaactttgctgcagtgacagtgatcgttgatcctaaagattatcccctcattctagatgaattgacggaaaccggtcagacgcagcttgccacgcgcaaacgcttagcggctaaagtatttcgccatacagcagcttatgacgccttgatcgccgattatttgacaaaagcagttgaagaatctgaaccggagaagttgacactgacgtatgaattgaaacaaacgttgcgctacggagaaaatagccatcaaactgctgctttttatcaagatgcattgccagttccttattcgatcgctagtgcaaaacaacttcacggcaaagaattgtcctacaacaacatcaaagatgcggatgccgctttgcgaatcgcaaaagaatttacggaacccactgcagtcgctcttaaacatatgaatccttgtggtatcggaacagcgacgacgatttttgacgcttttgaacgggcatacgaagcagatccagtttcgatttttggaggaatcatcgtattgaatcgccccgttgatgaagcaacagctgctgcattgcatcaaatatttcttgagatcgtgattgcgcctgcttttgaaccagcggcgctggatattttgacgaagaagaaaaacattcgcttgatgacgttagattttgtagcaaatcctgtcgaaacagaaatggtctctgtattaggtggtttattagttcaagaacaagatacattagcagaatctcctaaggattggacggtcgtaacgaaacgtcagcctagcaagaatgagttggaagcaatggcttttgcttggaaagcggtaaaacatgtcaaatcaaatgccatcgttttagcgaaccaatatcaaacagttggaattggtgctggccaaatgaatcgcgtgggttctgtaaaaatcgccattgaacaagctgctgaagctggaaaattaacggatgcagttttagctagcgatgcgttcttcccaatggatgatagcgtggaatatgctgcaaaacggggaatcaaggcaatcattcaacctggaggcagtattaaagaccaagcgtctatcgaaatggcagatcaatacggagtagcgatgatctttactggcgttcggcattttagacattaaaagacattaaattcaggaggagcagatgaagcttttagttattggtagtggtggtagagaacatgcaatcgccaaaaaattactcgcagatccgatcgtagaaacagtctactgcgcgaaagggaatccgggcatggtcagcgatggcattcaggtagttgctatcccagaaacagaccatcaaagcttgatcgcgtttgcaaaagagatggccatcgattggacctttgtaggccctgaagttcctttgcttaatggcatcgttgatgatttccaagctgcaggattgaacatttttggcccaaataaagcagcggcgatgattgaaggttcgaaggaatttgccaaagaattgatggcaaaatatcagattccaaccgctgaataccagtcttttgtagatagtgaaaaagcgaaagcgtatatccaagaaaaaggtgccccaatcgtaatcaaagcagacggtttagctgctggaaaaggggtcgttgtcgcagcaacagtggatcaggcactggctgcggtagaagaaatgttggaagaacaaaaatttggtcaaagtggtgccaaagttgtgatcgaagattttctggaaggagaagagttttcgctgctggcttttgttcatgaagagcaagtttatcccatggtgattgcgcaagatcataaacgagcgtttgatggggatgaaggaccgaatactggtggaatgggagcttactctcctgttccgcaaattcctcagtcaatgatcgatcaagcaatcgagacggttttgatcccggctgctacaggaatgattgatcaaggaacaccctttacgggtattttatatgcggggctgattgccacagttgaaggacctaaagtgattgaattcaattctcgttttggagatccagagacgcaagtcgttttgagtcggctaacgagtgggttagctcagattattgatgcattgctcaatggaagacagccggagattacttgggatcagcagttttctgttggtgtggtcgtggcggctgaagggtatccagaaacctatcaacagggaatgatcattccgcaaaaagcggctgaagatgttcaactgttttatgcaggggttgctgaaagagcaggagaattggtggcagcaggcgggcgagtatttttagcggaagggcaaggtgcttctttggaggaagcgcaaaagaaagtttaccaagcgctagcaaaaatgcctttgaacaagatgttttatcgaaaagatattggtgccaaagcattaaagtaaccgcaacttctctttggttccatcgtttaaacaaaagatcgctgatgagagaacagcgatctttttttcttaaaaagaggtagcgttttcaaacggatatgctaaaatagaagagcaaacagaggaggaaaaatacgtgaaaaaaattaaatttggttcaaccgatttagaaatttcaagtgtcattttgggattgatgcgaatcaataatgcaaaagatcctgtagctgtactgacgacagcaatcgagaatggtattactttctttgatcatgcagatatctatggcggtggcgaatgcgaaagtatttttgcagatgcccttgcacaaaccgaatataaaagggaagatcttttcattcaatcgaaatgtggtatcgtcccagggaaaatgttcgatttttcgaaagaacacattattaaatccgttgaaggcagtttgaaacgcttgaaaatggattatcttgacgcgttgctgttgcatcgcccggatacgttagtggagcccgaagaagtcgctgctgctttcgacgagctggaaaaagcgggaaaagttaagtattttggagtcagcaatcaaaatcctggtcaaatcgaattgttgaaaaaatatgtctctcaaccattgctggccaatcaattgcaatttggcatcatgcatactggaatgatcgatcgaggcatccatgtcaatatgacggatagcggcagtgtcgatcatgatggcggaattcttgagtattctcggctgaatgatatgacgatccaagcgtggtcgccataccaatatggattctttgaaggtgtcttcatcggaaatgagaaattcccagaactgaatgcaaaactggaagaattggctgagaagtatcaaacgactgcgacaggaatcgcatctgcttggattctacggcacccagcaaatatgcaggtgatcgcaggcacgatgacgccgcatcgtatcgaagagatcgctaaggcatctacgattgtgttgacacgccaagaatggtatgaagtatatttggcagctggcaatattttaccttaaaaaaagaagaaaccctttatttaatggaaactatctcaggaatgttcgtaaaagacgaacattcctgttgctttttaaaaaaaagattctaaaacacttgtatttatgagtgagctggtttaaattgttgtgggcattaaaaaataggcgacagccatttgatgcttgcttcactcttatcaagatttggaggatatttttatgtttgacatgaaagtttttgattacgaagatatacaattaatccctaataaatgtatcgtgaatagccgttcagaatgtgatacgacggttactttaggcaaacattcatttaaaatgccggtcgttcctgcaaatatgcaaacgatcattgatgaatcaatcgcagaatttttagctgaaaatggctatttttatattatgcatcgctttgacgaagcagcccgcattccttttatcaaaaaaatgaaggaaaaaggcctgatctcttcgatcagtgtcggtgtcaaagactatgagtatacttttgtcgaaacattggctgctgaaggactggtgcctgattatattacgatcgatattgcccatggacattccaatgctgtcatcaatatgatccaacatatcaaaaaacatttaccagatgcttttgtgatcgcagggaatgttggcacacctgaagcggtccgagaattggaaaatgccggcgcggatgcaacgaaagtcgggatcggaccagggaaagtttgtatcactaaaatcaaaactggttttggaactggtgggtggcaattagctgcattacgctggtgtgcaaaagcagctcgcaagccgattatcgccgatgggggaatccgcacccatggagatatcgcaaaatctgttcgttttggggcaacgatggtcatgattggttcattgtttgctggacatgaagaatctcccggggaaacaaaagtcgaaaatggtgtcgttttaaaagaatactttggctctgcttctgaattccaaaaaggggaaaagaaaaacgtcgaagggaaaaaaatctggatcccttacaaaggttctttgaaagatactttggttgagatgcagcaagatctacaatcatcgatctcctatgccggtggcaaagacctcgaatcgattcgaaaagttgattatgtgatcgtgaaaaactcgattttcaatggcgatacaatttaagttgcttcggctgtagaattgacagtggcatgaataaaagttcgatccaaaagatttctttggtcttacagcaagcgatagcaaaacattcttatcacttgctgctgagggcaacaagtcttttggtttttttattttcagcgctgaccttctgctttttgtggaatcatctctatcgactatttggtttttcttaatctttcgttataatagaagaaatgatgaaaaaaaactaaaaaaatattctgagctaaaagcggatattcagttgactaagtgagtaagagcaataacaataaagtaaacatgcagaaagaagcaggtgagtgtttgactatcaaagtaatgtccgtttttgggacaagaccggaagccatcaagatggcgcctttggtaaaagaattagaggctgatcctcgatttcaatcaattgtcgtggtgacagcccaacatcgcgagatgttagatcaagtattagatgtttttgcgatcgaacctgattacgacttggatatcatgacattgggacagacgttgaccggcatcactacaaaagtcttgctggaattagaaccgattctccaccaagaaaaaccgtcaattgtgcttgttcatggtgacacaacaacggcatatgccgcagcaaccgcagctttttacgctcagattccgatcggtcatgttgaagctggtttgcggacgtggaataaacgatcaccctatccggaagaagccaaccggcaactcatcgatgtgctagcggatctttactttgctccaacgcttcaaagtaaagaaaatctacttgcggaaaatcatgatccagaagccatctttgtcactggcaataccgcgattgatgccatgcgctacactgtttctcaagactatcagcatcctacactaacagacagaaaacagcgaaagattttgttgacgatgcaccgcagagagaatttaggtcagccgatgaagaatgtttttcaggcattggctcgaatcgcaggcgagtttccagaagtctcagtcgtttttccgatgcataaaaatcccaaagttcgagaaattgcccaagaaactctgggtgctttagagaatgttacattgattgaacctttagatgtcatcgattttcacaattttgccaaccaaagcacattgattctaactgattccggcggtgtccaggaagaagccccttctctcggtgttcctgtattggtgttgcgggacacaactgaacgtccagaaggcattgcggcaggaacgttgaaattggtcggtacaggggaagaggatgtgtatcaagcaacgaagcagttgttgcaggatcacgctgcatataccgcaatggcgcatgctgaaaatccttatggtgatggtaaagcaagtcagcgaatcaaagaagtgttggctcaatattaccgtctgtccggaatggcagatccttcgatccaatgatccaaaaactgaaaatggaattgaaaaataacaaaagtattttcacataatggttgacctatataattagatagactatagtgaggatagaaataaataattgttaggtgaggctcctatatggacacaagctgctgccgcaaaagtatcgagagatgcttagttggtaggacaggtctaatcgtgaaggttaaacccaaagcagctgataacgtcaagttatctacgccctatagtgctaaagctctacaatgatcatgagttttttacgcatgcttattgggagcatgcgtttttttgtgttaatggtcactgatgcctttattttagctgatacatacagacctttatgaggtgctgcaagacaattgctgactgcctttatttttgaccaacacttctgcatgatccagagtttcttgcttgataaacagagaggaagatgaacatggaataccccagtccccagatgaacaataaaaagaatgctaggggtagcaaatgcaactcctagttataggaggaaaagaagatgttaaaaaaattatctaaagatcaagaattaaaattacttgcacaactttcggaaagagagttgctgatggaaatgcggacttcgtttaatggactatcaaaagaggatgcagcagaacgtctggaagaatatggaccaaaccaagtagatgcacaaaaaccaacacctgcttggctgatgtttttaagtgctttcaaagatccttttgtattagttttggctttgctgatggtcatttcttttttcacaggtgattatgaagcagtggtcgtgatggaaatcatgatcttagcaagtgttacgatcacattcgtgcaagaatatcgttcgcaaaaagcaagtttggctttaaaagaattaattgaaaatacatgttctgtcactcgagacggcgaaacgatcgagattccgatggatgaagtcgtaccaggagacatcgtgacattggcaaccggggatatgattccggcagatgctattttgatttggacaaaagatttatttatcaatcaatcttctctgaccggagaatctatgccggtggaaaaatttgtcgatgctgggatcaaagattctaaagaaacgatttccgcattagatatgcaagatttggttttcatgggaacggatgtccttagtggacaaggtaaagcaattattttaaaaaccggtcaaagtactttttttggtgatattgccaaaaatgcaacgtcaaaacgaggaaagactacttttgaggatggtttgacgaaagtcagtaaattgttgctgcgaatggtaatggttttgtttcccatcgtctttttgatcaatggattgacaaaaggcgactggggagaagcccttttcttcgcaatcgctgtagctgttggcttgactccggaaatgttgccaatgatcgtcacaagtaatttggcaaaaggtgccatgtcgttagctaaagaaaaagtgatcgtcaaagaattgccttcgattcaaaacttgggcagtatggacgttttatgtacggataaaaccggcacgatcactgaagatcgcgtcgtattagtgcagcatctgaatccgtttggtaaagaagaccaacaagtgttggatatgacctatttgaattcctactatcaaacaggttggaaaaatttgatggatattgcggtattgaactacttcgaagatacagagcgccaagcaccgtatcaagaagtcatcaaagtggatgaaatcccctttgacttttcccgccggcgtttaacagtggttgtcaaagcagatggacaccaaatcatggtcacaaaaggtgctgctgaggaaatggagaaagtctgcaaatacgtggaagtcaacggacaagttctggaattgacagatgaattaagagaaaaacttcgtgaggtaaatcaccgcttgaacaaacagggcatgcgtgtcctaacagtagcaatcaagcgagatgctcacgcagaagccgtctacacagttgaagatgaacaaaatatgatcatgatcggattcatgggctttttagacccagcgaaagagtccgcaaaaacagctattgcttcattacatggtcatggtgtcaacgtgaaagttttgactggtgacaatgcgatcgtggcgcaaaaggtgtgtaaagatgtggggatcgaagtgaacgactatcttctagggatagacgttgatcgtctctctgatgaagaattggctgaaaaagcagaagcggtcaatctatttgctaagttgaatcctatgcaaaagtcacgcatcattcagtcgctgcaagccgatggtcatactgtcggatttatgggagatggaatcaatgatgcgcctgcactgcgggctgctgatgtcggtatttctgtagatacggccgcagacattaccaaagacgcaagttcgatcattttattagaaaaaagcttgaatgtgttagataaaggcgtcattgaaggccgtaaagttttcacaaacatgatgaaatacatcaagatgacattgagttcaaactttgggaatgttttttcgattcttgtcgctagtgcattcttgcctttcttgccaatgctttctattcaattgctggtgcaaaatctagtctatgatatggcacagttgactattccttgggataatgtggatgtggaagaactagaaaaaccagtcaagtggcaagtcagaggcttattgaaattcaccgtaagcattggaccagtcagcagtatttttgatatcttgacattcttcgtgatgtggcatgtgttccaagcaaatgccattcaagaacaagcgctgttccaagccggctggttcatgatcggtcttgtgacgcaaacattagtcgtgcatatggtccggacgcgtaaactgccatttttccaaagtatcgcatcgccagcagtcttactgtcaagcgttcttgcgattttggtgggtttcggtattatcttgtcgccgctgcacacagtctttgattttgcagcgctaccatcttcttactggccatggtttgtcggcattattcttgcctacctggtaagcgtagaagtagctaagagaatctatatccattatacaaaagagtggatctgagaaaagaaacggatagtcataaaagattttaacttttatgctatctgtttcttttttattctattctgtattatttttttctcattatcaaaaaaaactaattttactaagtcggaacattcacaagggaaagtcctcgaggtgttacgtttctgtttagttaaaaggcgaagtctgtactattcttaaaagaaaaaaagaatttaataaggagcaaagcaagaaagcgattgcttaaatgtgattgttttcactaatcgtttcttaagagttggtctaatgggaatcgttttatttaaaaaaaataccttttcacttgtcttattctcgtttaaatgataatttatagtagtaaatgatttttcgatgatacagattttatccctgttacattcgaaagtgaatttttatatcagagaggaaagtgtgtcaagatggcaaaaaaacaaaaagcacttgatttccaagcaattttggagcaagtcaatgcagattttccaacttatcaagcattagataaagacggaaaaatcgtaaatccagatttagtacctgatctaagtgacgacgaattagtcgagttgatgactcgcatggtatggtcccgtgtattagaccaacgctctactgcgttaaaccgtcaaggtcgtctaggtttcttcgcgccaacagctggtcaagaagcaagtcaattagcaagtcattttgcatttgaaaaagaagatgtgcttttaccgggttaccgtgatgtccctcaattgatccaacacggccttccattgaaagaagcgttcttatggtctcgcggacacgtagctggaaacctttatccagaagacttgcaagctttaccaccacaaatcattatcggtgcgcaatacgtgcaagctgctggtgtagctcttggtctgaaaaagcgcaacaagaaaaatgttgtcttcacttatacaggtgatggcggttcttcacaaggggacttctatgaagcaatcaactttgctggtgcttaccatgcaaacgctgtattctacatccaaaacaacggttttgcgatttcaacacctcgtgaagttcaaagtgctgcgccaacattagctcaaaaagcagctgcagctggtatcccaggaatccaagtggatggtatggatccattagcagtttacactgtctcaaaagcagctcgtgaatgggcagcaaatggcaatggaccagttttgattgaaacattgacttaccgttatggtccacacacattatcaggggatgacccaacgcgttaccgttcaaaagatatggacagcgaatggcaacaaaaagacccattggttcgcttccgtacgtacttgactgaaaaaggactatggtctgaagaaaaagaagaacaaatcattgaacaaactaaagaagaaatcaaagctgcaatcgctgaagctgaccgtgtacctaaacaaaaagtttcagatttcttgaaaaatatgtttgaagtacaacctcaaaacattaaagaacaaattgcaacttacgaagcgaaggagtcgaaatagtcatggcacaaaaaacaatgattcaagcaattacagatgccttagctgttgaaatggaaaacgacaaagaaattttagtctttggtgaagacgtcggtaaaaacggcggggttttccgggcaacagaaggtttacaagaaaaattcggtgaagatcgtgttttcgatacccctcttgctgaatctggtatcggcggtttagcttttggtttagcactagaaggtttccgtccagttccagaaattcaattcttcggattcgtttttgaaacatttgatgaaatcgttggacaaatggcacgtactcgctaccgtatgggcggcacacgcaacttgccaattacgattcgttcaccatttggtggtggtgtgcatacaccagaattacactcagataacttggaaggattgattgctcaatcaccaggtatccgtgtcgtgattccatcaaacccatacgatgcaaaaggattgttaattgcttctattcgcagcaatgatcctgttgttttcttagaacatatgaaactttaccgttcattccgtgaagaagtgccagaagaagcgtatgaagttccattggataaagcagcggtgactcgtgaaggaacagacgtatcgatcatcacttatggtgcaatggttcgtgaagcaatcaaagcagcggataacttagcaaaagaaaacatcaatgctgaaattatcgatttgcgtacagttgctcctcttgatgtggaaacaatcattaaatctgttgaaaaaacaggtcgtgtggttgttgttcaagaagctcaaaaacaagcaggcgtaggcgctcaagtcgtttctgaaatttctgaacgtgcggttctttcattagaagcaccaattggacgtgtatctgctccagatacaatcttcccattcggtcaagcagaaaatatctggttgccaaatgctaaagatatcgaagacaaagtgaaagaaatcgtgaacttttaatagttgaagaagggaagaatagaaaatggcatttcaatttaaattaccggatatcggtgaagggatcgcagaaggcgaaatcgtaaaatggttcgttaaacccggcgataccatcaatgaagatgacactttattggaagttcaaaatgacaaatcagttgaagaaatcccatctccagtcacaggtactgtaaaaaatatccttgtatcagaaggaacagttgccaatgttggtgatgtattagtagaaatcgatgcacctggccatgaagacaatgaaggagatgcaggtgtggcagcgcaagcccaaactcctgcacaaccagctgctgttccaacaacggaagctgcatctgctggttcttcagaaggcgaaggcgtattccaattcaaattaccagatatcggagaaggaattgcagaaggcgaaatcgtaaaatggttcgttaaacccggcgataccatcaatgaagatgatactttattggaagttcaaaacgacaaatcagttgaagaaatcccatctccagtcacaggtactgtaaaaaatatccttgtatcagaaggaacagttgctaatgttggtgatgtattagtagaaatcgatgctccaggacacaacagtgcaccagctgctagttctgcagcgccaactgcagcgccagaaaaagttgaaacttctggctcagcaagtgtcgttgaagctgctgatccaaacaaacgtgtattagcaatgccttctgtccgtcaatttgctcgtgaaaaagatgtcgacatcacacaagtaactgcaactggcaaaggtggccgcgtgacaaaagaagacattgagaacttcctatctggtggcggagcttcagcaactgcagaagcagcagctccagcaaaagaagaagcacaagcaccagcagctgaaagcaaaccagcagcaccagctaaagccttcaagtctaacttgggtgatttagaagaacgtgtagcattaactccaacacgtaaagcaattgcgaaagcaatggtcaacagcaaacatacagcacctcatgtaacattgcatgatgaagtagaagtaacaaatctttgggataatcgtaagaaatttaaagaagttgctgctgccaatggcacaaaacttactttcttgccatatgttgtaaaagcattgactgctacagtcaaaaaattccctatcttgaatgcttcaatcgatgatgcaaaacaagaaattgtgtacaaaaactactacaatatcggtattgctacggatacggatcatgggttatatgtaccaaatgtcaaagatgcagaccgcaaaggaatgtttgctatcgctgatgaaatcaacgaaaaagctaaacttgctcatgacggcaaactttctgcagatgacatgcgcaatggaacgatcactatcagtaacattggttctgtaggtggtggctggttcacaccagtaatcaactaccctgaagtagctatcttgggtgttggtacaatcgcgcaacaaccaatcgtcaatgctgagggcgaaatcgttgtcggccgcgtaatgaaactttcattgagctttgaccaccgaattgttgatggtgcaacagcgcaacaagcaatgaataatatcaaacgtctattagctgatccagagctattaatgatggaaggatgattaacaaatggtagttggagattttgctgttgaattagatacagttgtaatcggtgcgggacctggtggctatgtagctgccatccgcgcagcggaaatgggacaaaaagttgcgatcattgaaagagaatacattggcggtgtttgtttaaacgttggttgtatcccttcaaaagcattgattgcagcaggacatcattaccaagaatcactagattcgacaatgtttggtgtaacaagcgaaaacgtatctcttgattttgctaaaacacaagaatggaaagacaacaaagttgtgaaaacattgacttcaggtgttggcttcctattgaaaaaacacaaagttgaaacaattgaaggggaagctttctttgttgatgatcacacattacgtgtgattcatcctgattcagctcaaacttattctttcaataatgcaatcatcgcgacaggttctcgcccaattgaaatccctggtttcaaattcggtggacgtgtgcttgattctactggcggattggcattgaaagaagtgcctaaaaaattcgttgttatcggtggcggtgtcatcggttctgaacttggtgctgcttatgcaaaccttggagcagaagtaacgattcttgaaggttctcctcaaattttgccaacttatgaaaaagatatggttaaattagttgaagaagacttcgctaaaaaaggcgtaacgatcgttactaatgcaatggctaaagaagctgttgataatggcgatagtgtaacggttaaatacgctgttgatggcaaagaagaatcagtgacagctgactatgtgatggttacagttggtcgacgtccgaatacagatgacatgggcttagagcaagccggtgtcgaagttggcgaacgtggattaatcacagttgacaaacaaggccgtacgaacgtatcaaacatctttgcaatcggagatatcgtacctggtgcagcacttgctcataaagcaagttatgaagcaaaaattgctgctgaagccatttctggtaaaaaagttgctgttgattataaagcaatgccagcggttgcctttactgatccagaattagcttctgtcggtatgacgatcaaagatgcaaaagatgctggaattgaagcgaaagcttacaaattcccattctctggaaatggtcgtgcattgtctcttggtaaaacagaaggatttatacgcttagtaacaacagtagaagacaatgtgatcatcggtgcgcaaatcgctggtttaggtgcaagtgacatggtttcagaattggctcttgcaatcgaatcaggtatgaacgcagaagatatcgcgttaacgatccacccacatccatctttaggtgagatcaccatggatgctgctgagttggcattaggcttaccaatccatatttaatgatagaagactcgttcatcctttcgatgagcgagtttttttatgtgatcaagtatcagtgaatggcataaaatactgacggttgcctacttgattgctgtagcaaatctgtctgaattatgctatattaagttgctatttaaaacggatgaaggcggggattgtatgcgtaaacaattgggtgggaaaacgattcgtctctattatacaagtctgcaatttctttattggatgatgttttgttcaatttatggatttgccacattatttctgatttattttaagatcgatccagcaaaaatcggtgggatcttagcacttatcaatattttttcagccgcgcttcagcctttcatcagtcaagtgatcattaaaagaaaaaggattcccttgattgctgtcctaaaagggatgacactgagcctgattatcgctcttctagtagggttattactgccagcactgacgattatcagttttatcattggtgcaatcgtgctagtttccatgcagtcatttatcaatgctcttgcatttgagtatgtgaacaccggctatgggattaattttggtttttcgagagcaggcggttcactaggatatgccgcaacctctttcttattagggcagttgttggcgagctattctgctgcgcttctcccaataatggcattagtagaagcaggactgttttttgtcctcttacttttgctgcccacagtgaagacaagggttctgccgttgaagatagaagagaagcattcgggtgggttaggaaaaaaatatccttttttacttttgttatttataggattcagctttctgttcagctttcacacaatgatcaatagcttcttggcacagatttttgcttcgatcggaggcggcagcaaagaaataggaatttcattaatgattgctgcattatgcgagttgccaggaatgatattcttcgaacatttggtcaaaagaaagtccagcaagttttggcttttgttttctagtatcgcatttgcagtcagaggagtaatgatgttgcttatcagcacgattgttatgatggaaatgacacacctattgcagggctttagttttgctttatttatcccagcgtctgcttatctcttcaatcacgtattggcagatgaagatcgggtatttggacaaacgctgatcattattgcgacgacattaggcggtgtgctggggaatatcttaggcggcagccttttacagaacttcggtgtctggcagatgttattgtgcggcacgtgctttgctttgattggagcgttattaacgctatgggggatccgtaagctgccaaaggcctctgctgtttccgatctttccgaatagcagacaaggaatgacaaaaatagctagagcaatgttcaaaaatgataacgaaaaagagtggcgaacaatcatcgccactctttttcgttaaagtgaatcagcctagccgggttatttcttttctaaaacagcgatgaattcccgcatataatcgggcaggtcaggtggtctacggcttgaaacgatatgaccgtcggtgataactggtgtatccacccaagtagctccggcgtttgtcatatcgtcttttatgccaggggtgctagtcacttttcttccttgcaatatattcgcggaaatcaagacccagccggcatgacatatttgaccaatgactttttcttctttgtccattgcttgaacaaaagaaatgacttgtgggaatcggcgcagtttatccggtgcccaaccgccagggactaagatggcatcataatcagccacatggatgtcgtcaaaagcaaacgcggattctgcaggaactccgtattttcctttatagcttttatgggcttcttcgccaactaaatccacttgagcgccttcttctcgcaaacggtgaacagggtaccaaagctctaaatcctcgaaatcattgtcgactaacgcgatgatttttttattttctaagcgcaaatgaaatcctcctttattcttgctattcttactgtaacatcaaggaaaaggaaacaccaaaagaatgcttttcaagaaagacgactagcatttatctgtaaagtttagccgcaagagtaaaaaaagcagtcgttaaagaaaatagaagatcaatgaagggatagttctagcagtgtaagcgttgtaacgaataataaattaggtcataatcaaagtaaccaataagtcttagcaagccttaacaagtctgaacagatctgaacaagactgaataggagcgtgaaaatagggaaccttttgaaaaagctagacaatctatttaccagaatgtacgtccattggaacttgcacgctggcagattcattttgaagacggtagtcgggagaatgttttacagatgttagaggtctatcaaaacgaggatggcggctttggtcacggcttagagccagacaattggaaacccaacagcaccccgattgcggcgtgagctgcctgcagtattttatgagagatcaattgccttgatgctaaaaatcctatattacaggggatcttgaggtagttgtccagtgggaaagatttttctgaagggaaatggcggaaccaagtacctccgactgcttttacccccatgccatctggtgggagagtcctgtaggtgtgccggctaataatcccaccgtgagttttgctggtatgatcatccgcgtggaagctactggtttatctcaacaaacggagggaatccttcaaaccgccattgaagctttctcaatgagacaacgatgataggcatacattagtcgtttaattggaaatactaaactattgtaaaaaaacacatgatcaacctcttttggagaacataaattttcaagaagtgttgttccaacaaattcgtcaaaccgtctcaaaagacccagaagaatggttcacttcttacaccagcaaaccatcggactttttttctcgaaagaacaaatgctcaccatttttgataaagaactttgtcagcaagaagccgctaaaatctcagagaaccagctagaagatggttctttccctattccatggcaatggggcacagaatatacaaagttttatatcagcgtgaattggtggaaatccgttcagatcatcaagaattttttatttttgcatgctttttcaaaataatttgaagcttctcattgcagtttgatttagaaggcggtactttgaaagtaaaggagggactagtatggtcgatgaaaaaaagaaagatttcaataagatgctccatgagacgaaaggaatgccgaaaatcaagcaaatcatagatgaaaagagtattgagaaatatgggggaaagagaatgcttttggctcctccagtggattacaatcaaatcatggggcgtatcccattaggccaagtgatgacgattagtaagattcgcgagtatctggcagaaaggtatggcgccgatttcacagatccaatcaccgcgggtatttttgtctccatcgcagcatgggctagtgaacaaagaaaaacagataaaattcctttctggcggacattaaaagcgaatggggagttaaatcctaagtatccaggcggaatcgagaaacaaaaaagcgctttggaaaacgagggacatacgatccttattaagggaagaaaaaacctacgctattatgttaaagactttactgaagttctagcacaactatctaaatgaaccaacgtggaatgagttaaggtatctcgtattttagttagagctaggactaagctcgattaagtctgtaaaaggcgatatagcctaggcatcatggggtcttcttcaaaacattcgttcattttttttaaatagggggtgcatctctcattgagagctgttctcttttattttgcgacagagtctctgaccaatttgtatttttatggtacactgaataggacgaataggggtgattaaaatgcgtgattatcaatatcctctagatctggactggtcaacagatgaaatggttattgtaatgaatctatgggatcgcttagaacaagcctacgagaaagggatcccggcagcggagtttttagaagcttatcagcagtttaagaaagttgtgccaagtattggggaagagcgccgtttaggcagagatttcgaagacttgagcggatactcattgtatcgaacggttcaagcggccaagacgacaagcggtaaactgaaaatgaaggagtagaaagcaaccatgcaagaaatcgttagtgaaatccatagctggatgattgcagcaggggaaaaaatcaaagaaaacctaaataaagagtctctgatcgttgaaacaaaatcaggtcggaaagatttggtgactgaactggataaggcgacgcaggattttctaattgagaagattcaagcctttgacccagaagcaaaaattctaggggaagaaaatggtttagatcgactttcagattttagtggacgagtatttatcattgatcctattgacggaaccatgaatttcgtgttggaaaaagagaatttctgtatcatgattgctgtatatgaagaaggccaaggacgttttggctttgtttataatgtcatgaaaaatgaatttctttggggtggtccggaaattggggtcttttgcaacggaaaaaaaatcgatccgccgaaagatatcgctttagaggaaggattgatcggattaaatgcgcccatgttgatgcataatcgtcatcatgaagtcgaaatgagtgaacgggcactaggtgtacggatgaccggttgtgcgggcatcgaattgattgcgctggtcttaggtcagcgtgcaggctatatttccaacctagcgccatgggactatgcccctggcggtatcttaatggaaacattaggtttgaagatggcgaatatcaccggagaggaacttgctctagatggtcgggaattgtttattggtggcacaccaacagcatttcaagaattattgacgatcgcaaatcaataaatgacgagcagatatctacgggtatctgtttttttctgtaaaaatgaaaactttgcactatatttcagaaagaaattctggtataatggcttgtcgagtgcaatgtcaccaaaaaaggagtttataaattgaatattagaaatgatatccgcaacgtcgctattattgcccacgttgaccacggaaaaactacattagttgatgaattattgaaacaatcccaaacgttagatagccatacccaattacaagaacgggcgatggattcaaatgcgatcgagaaagaacgtggtatcacgatcttagcaaaaaatacggccgttgaatacaatggcacaaaaatcaacatcatggataccccaggacacgcggacttcggtggagaagtggaacgaatcatgaaaatggtcgacggtgttgtcttagttgttgatgcgtatgaaggaacgatgccgcaaacacgttttgttttgaaaaaagcgttggaacaacatttagtgccaatcgttgttgtaaacaaaattgataaaccatctgctcgtccagaacacgttgtcgatgaagtgttggaattatttattgaattaggggcagatgacgaccaattagatttcccagtcatttacgcttctgcaatcaacggtacatctagtgcatcagacgatccagctgatcagcaaaaaacgatggcgccattgttcgatacgatcattgaacacattccagcaccaatcgacaacagtgacgaacctttgcaattccaagtatcattgcttgattataatgattatgttggacgtatcggaattggccgtgtcttccgcggatcaatcaaagtcggcgaccaagttgcattgatgaaattaaatggagaagtcaaaaaattccgtgtaacgaaacttttcggtttctttggtttgaaacgtttagagatccaagaagccaaagccggtgatttgatcgcggtttccggaatggaagatatcttcgttggtgaaacagtgacaccaattgatcaccaagattcattatctgtgctgcatattgatgaaccaacattgcaaatgacattcatcgtgaacaattctccttttgctggtcgtgaaggaaaattcgttacagcacgtaaaatcgaagagcgcttgatggctcaattgcaaacagacgtgtcattgcgtgttgatccaattggacctgactcatggatcgtttctggccgtggagaacttcatttgtcgatcttgatcgaaaatatgcgtcgtgaaggctttgaattgcaagtttctcgtccagaagtcattgaacgtgaaattgatggcgtgaaatgtgaaccatttgaacgtgttcaaatcgatacaccggaagaatacatgggatcagtcatcgaatcattgggcatgcgtaaagcagaaatgcaagacatgatcaatacaggaaatggacaagtgcgcatcattttcttggcacctgctcgaggattgatcggttatacgacagaattcttatctatgactcgcggttacggcatcatgcaccacaccttcgatcaatatttgccaatgatccaaggtcaaatcggtggtcgtcatcaaggcgcactggtttctatcgatacaggtaaagcaacgacttactcgatcatgagtattgaagaacggggaactgtttttgttgaaccaggtaccgaagtatacgaaggaatgatcattggtgaaaactctcgtgacaaagacttaaccgttaatatcacgaaagcaaaacaaatgactaacgttcgttcagcaaacaaagaccaaacatccgttatcaagaaacctcgcattctttctttggaagaatcattggaattcttgaacgatgatgaatactgtgaagtaaccccagaaagcattcgtttgagaaaacaaatcttgaacaagagcgaacgggaaaaatcacagaaaaagaaaaacagctgataaataaaacacctaaggaagtctaagacttctcgtgtagatgattttccgaaggatggaaaaggaattgctcttgtggtgcagcggctcttcgccgcagagcctaaaagcaatcagccgattctatccttcggatgttttttgttcaaaatgttggcgaagagccatcatcgaaataaacagcgcttgcaatttcagtgattcctttttaaaatgagaaaagcaagtacaaaggagaaacctatgaaaaattatcctgttaagaagaatcaggaacttgaggtcgatattttagatctttcccatgaaggaaacggcatcgccaaagtcgatggctatttactttttattgaaaacacattacccggcgaacgtgcgttagtcaaagtgttgaaagttggcaacaaattcggttttgccaaagtgatgaaactgttacaaacgagtccagatcgtcaagaactgcctaatgaagatttgttgcgaaccggtatcgcacctttgagtcatttgaagtacgaaaagcaattggcattcaaacaacaacaagtagagaatgttttagcaaaagtcgcgaaaatgccgcaagttgaggtattgcctacgatcggcatggaacaaccttttggctaccgtaacaaagcgcaaattcccgttcaaaaaatcaaagggcagttgactactggtttttaccgcaaaaatagtcataccttggtgccaatcgaagatttctatatccaagatccggcgatcgatcaagcgatcgtaactgtgcggaacattttgcagcgttttaacgtcaaagcctacaacgaagaagctcacgaaggctttttacgacacgttgtgatccgtcgcggacaccactcaggagaaatgatggtcattttagtcacacgaaaagcgaagtttttcaaaggagaagagattgctgaagtcattcatgaagagcttactgaagtagtatcggtgatccaaaatatcaatgaagaaaaaaccaatgtcatcatgggtgatgtagagaaagtcctttatggaaaagcttcgattgatgaccaattgttcgataagacgttccaaatctctgccaaatctttctaccaagtcaatacggcccaaacagaagtgctgtatcaaaaagcgtttgaattagcagatctacagccggatgacattgtcgtggatgcatatgccggaatcggaaccatcggaatcagtttagctgatcgtgtccaagaagttctcggaatggaagttgttgctgaagcggtcgaagatgccaaagcaaatgctgcgagaaatggcttagaaaatgttcattactttgtaggcaaagcggagaagattatgcctcaatggttacgtgaaggcattcagccaactgttgtctttgtcgatccgccaagaaaaggtctagaagctagctttatcgagacaacagctgcggttaagccagagcgcattgtctatatttcttgcaacccagccacactagcacgtgatctagcgctatttgcagaagaaggctatgtgacaaaacaagtccagccagttgatctattcccacaaaccactcatgttgagtgtgttgtcttgatgtcaagggtggagaaataggacttttcaaagcgctgataaataaagggtttcctgacattgaacttttctcacggctactttgccgaggatgttaatgtcgagaaacccttatttatattctttgaggaaacatatctaccgcaaaaatgttcgtaaggttgtggagacagattagataacttcatgaggttgtggagataggatagatgaaacattccctacttttgaaatgaagggctattcttatcccaatatttaagatatacatatcataatatttgagttgaaaaagtaattacatttcaagtgtaaatagtcattcctatagactgattttcttggtattataaaaagaaaaagcaggtgtggatatggaaagtgaagataaagtacaaaaacagcctatggacttttataatatgtcagattttttgtaggtagtttgaactttaaagaagatgatcttgtctacgagataggtactggaaaaggtcatttaacggaatctttagcaaaacgaacgaaaaaagttatctctatagagaaagataagtatttaactgaaaaagcgaaaaagaagttaaaaacgtacgccaatgtgcgagtataccacgtggatgttttgaaatactcgtttcccaataaagatatacaatatcgtgtgtttggaaatattccatttaacattagtaccgacatagtgaggaaagttgattttcatagtcgtgcatatcaaattgatttgattgttgagtatggttttgctttgcgactgatggatacatcaagattacttggggctcttttgttgccggaggtagaagtccatatactaaaaaagattccgaattattattttcattctaaatcaaatgttcaatgtgcattggttcgtttggtacggagatcaaatcgtttcagtaaaaaagaaatagaggaatataaaaaatttattgaagcgtggatatcggggaatattcatttgatatttacaaaaaatcaattgagaagatcgttagcgaaagctggaattactacagaaaagcaaataaattattctcaagctctctctctttttaaaagctatagaatcaaaaaaggcaatgtctagtgttaaggcttgtttcattcattaaccatatgataatttcttgcatttatatattatctgtctgttttctataaaatcagatttgtttgttactatctgttattcttgatgtaaactttaccacatttttccatcatttgttgagtcataaaaaataattaaaagctagtgaatgtgttccctcttatcgataatatcaagaaataaattaaattatagtttactgaaaattaatgccaactggggtttgaagtaacgtatttcccttagtcggctattttttacgattaattagctcagaaatcaattggagagcgtaaatgtaaaaataatggatgaataggtctcagtctcgtcaaaaaatattgttgacaataagtctaattagactataatgtttatatgatattcgtctaattagactatgatcatttttataactcaagaaaattgaacgaagcagtcaattaactgagtatctccacagtatttattgaagcttggaagtatttcttcgtaaatagccaatagaaagaaaggatgaagaaaatgatgaaatcatttttaatgataggacaatctaatatggcagggcgagggttcatccaggatgtacctcccatttataatgaaaaaattaaaatgttgcgtaatggaagatggcaaatgatgacggaacccattaattatgatcgccctgtttctggaatcagtctagctggttcctttgcagatgcatggtgtcatgaaaatccagaagagacgattggcttaattccttgtgcggaaggtggcagtacgctggatgagtggcatgtagatcaggctctttttagacatgctataacagaagcaaaatttgctatggagaatagtgaattaacaggaattctttggcaccaaggagaaagcgatagtatgaatgggaagtataaagtctattaccaaaaattactttcaattatgaaggcttttagagaggaattaaatgcccccaatataccgatcattattggtggcttaggagattttctaggtaaagaggggttcgggaaaaattgtacagaatataatttcatcaatcaagaattgcaaaaatttgctttcgaacaagataattgttactttgtcacagcagaaggtttaacatctaatcctgatggtattcatatcgatgcaatttcacaaagaaaatttggcttacgatattttgcagctttctctaataggcagcatatattaaatccattaaataatgaaaatgaatggaccaagcttcataatgaacgaccacatacccaaacggaaaagatatatatggcaagtctggaattggcgttaggcaaaatttcctattctcaatttgaaacacatctgaaacaaatctctaaggggtaaggtgtagcataatagtatatgagttcgaggtgtgaggagggcatttttttgattccactactaattttaggtctattaaagcaaaaaccgggttcctatgggtacgaattattagctttaatggaggatcgtcactataaatatatcgtaaactatacaaaaggatccttctattataatctgcaacaattagaagaaaagcaatatattaaaaaaattgatcaactggatgacacgagagaaaagcataattatatcattacagaacgaggaaacaaagaattcgaaaaattaatggtaaagtatggatctaagaccgattatatcaatttctctttttatgcagcgatgttatttgctaacgaatataaaaaagaggaatttataaagctaataaaaatacaaattgaacaaacgaaaaagaaaatttttttattagatcaaacacttcaacataatgaagctatccctacttattttaaaaagatgttggaaaattcccgttctcatcatgtcgtaaacgtgcaatggtttgaagaattattaaaggatactactagtgaaagcacatctaaataatcgaacacaccccagaaagaagacatctagctattatgaagcttgaggaggatttgttttgctgaggtctatcgttatcaaagaaattgaaagcaaatggacagaatctatctttctaaagagaatgaagggaaaagggatagttggtatatagcatttttaaatatcaaaaggaaagatgccatgaggatattagagcgtccattcgagaaaacggatttttatcagagcgaaaagaatgttatatgatatttattgatctgctccaacggacgacgctctcctaaaaaagccatcgtatactgctatgtttcctaggatgtaaagaataaatcttcttcttttttggactgcagagaaataaaaaggctactcggcattctggctgaaagcttcggtagaaatatgggaattaaatcagtttgaaactttgcaacaaaatcttataaaaatttgaaagcgggagtacacatgattaccttaaaatctaaaagagaaattgagttgatggctgaatctggatcgttattagccgatgttcatatccatctacgagattttatcaagccgggaattactagctgggacattgaagtttttgtgcgtcaatacatcgaaagtcatggaggtattgctgcccaaattggatttgaaggttataagtatgctacatgtatcagtgtgaacgacgaaatttgtcacggatttcctaaaaaacaagtcttaaagtcaggtgatttggttaaagttgacatgtgtgtcaatttaaatggcgcgatctcggactcttgttgggcttatgtagtaggtgcaagcacaccggaagttgacaatttgatggcggtaactaaaaaagctctttatcttggaatcgagcaagcacaggttggtaatcggactggggatattggtcatgcgatacaagcttatgtagaagcacaagggtacagcgtcgtacgagattttattgctcatggaattggacctagtatccatgaggaacctttctttgctcattatgggacacctgggaaaggggttcgtctgagagagggaatggtcatcacgattgaacccatggtgaatgtaggtgatgggcaagtaaagatgatgtctaatggatgggaagcaagaactctagatggcagtttaagttgtcaatatgagcatagcttggcaatcactaaagctgggccgttaattctaacatctcaaggagaagaaggaacttattaaacgaaatatatgatttataaatcggcattaatggataaggatagaaaagtatttttattttagcggcaaccggtgctccttttcttttatccaataaatcgcatgaaaagaacgatttttcgtaatttcatacgactttttctagggacttatgtcacagctcctttgcgcagacagtacgattggtagatatgttcccgtctaccgatagccccaaaaacgcagtagatatgtttccgagaacggccaggttcgaatgacattcattctgtcctctcaagccatgtggaatgtgtggtcttgttgaccaagtaagattaaacaaatatcagaacgactcagaaaatatcctgagtcgttctttttaagtagatgaacaaaagctagcgattacgagaagaaggcgcattttaatgtaataaactaaacgcgacaacttaatcttgataataagcaataggttgcatataatataggtaacctattacctattgtgaaagggaaatgctgatgaaggccccagaaaatcctagacatctattatttggtggaacatttattctagcgaacaaactccaatttgcaggagacaaatctgtcactggattaaccacgaaacaatggtttttactaatgaatcttagagaactttctaaagtgagtgtacctagtgtcaatgaattagcgagtacgatgaatacatcaagacaaaatattgccaagatgctcgacacaatggaaaaagaaggacttgtatcagttagtcaaagtgcccaagataagcgagtcaaagaagtttttataacaaaaaaaggacaacaattggcaaaacaaagtgaaaaagaaagtcaagattttcgagataaagtttttacaggaataacagacaatgaattggcaattgcttctcaagtcacactaaaaatgatagagaatctggaacgcataatcaaggagatggatcatgatgaaggataacctagcggttgtatacttttctaaacatgggatgacagaaaaatatgccagatggattgcagaagagttgaacgcagcacttatcgacgggaaaaaagtcaaagacgtagaattgcgtaaatattcatttgtcatttttggcggtcctatttatgctgggaaaatcactggtgttgatttactgaaacgaaaccttttcgatcatctggttgtatttacagttggtctgagcgatcccgtcggtacggattatgctgatttagataagagtcttcaaaaattaaaaagcattcccgaaggtatttttcattttcgaggcggaatcgattatacacaattaagcatggcaaataaactgctgttaaaagtgataataaactcgttaaaaaaagtacctgatgctgaacttacttcggaaaacaaagcattgatcgaaacatatggacagacggtcgattttagtgatagaaccgctattgaaccgttggtagcttatgtaagaaagttagttgagaaggaaagttaaactgataaagtcatacacttaatgaggtggatgattcatcttacatatggattgaatggattgttaaagacgtctctgcaaaagagtcgtctttttgttttcaaaggcaaaccaatttaatcaaaattggtaacttctgaagtagatgattgattcattctccattttactttcaaacagggaaatagtaaacttgaggaaaatcaatgcgatagtttttcactcaccgttcaagacattcggttgaaaaaataacaaaaatcctgcaaaacggatgcttatcgggttttcttcgaacaggattgaccagagaaacaaggagagttgctagagacgtgctactaagtttttttacaggaaatccagtttatatttgcttgcagtctaatttaggcagaggagaaggctatggataaactttatttggaagacatagaagagattatcgcacatcgatacgacaatggcgccgattactggacgactgaggaccgaaaattattgaaaggggctccgtttaccacgttagaaagtccaatgtacttacttgaactgggagtgtctccccaggatgcgatcctaacagaaacagcggagctgattttcagcacttggagagaagatggtcgtttcaaaacttccccatctggtgggctgtatccttgccatacggcgttagccctaaggaacctgtgtgttctcggttatgcggaagatcaacggcttcttaagaccttcgactattttatttccacacagcaagaagatcggggttggaaatgcaacaagtatagctttggtcgaggacctgaaacggagcattctacaccgatgacgactttaacgttattagatgcctttcgctatagtccattcggaaagaatcaagcggttatccatcctgcgatcgagtttctgttgacgcattggagactgaaaaagccaatcagtccttgtcattatggcattggcacgctgttcatgcagacggaatatccttttaggggatataatctcttttattatctgtatgttttatccttttacccttatgcgaaacgagatgagcgctttttggaagcgttacaccaatttgaaacaaaattagtagagggcaaagtcattgtagaacgtgttgtgccgaagttaggaaagatgaatttttgtaaaaagggacaggccagtcaattagcaacgaaacgttatcaagaaatattaaccaacttagcatagcatttttggcaattcagcagaacaggaggtaagaaaatgacagaaacttgtttgacacttcgtccattgaccaatgagatcgaactagtcgatcgctggttaagaaaagagtatatcaagaaatggcttggttcggcagaagattggttgacggaaatcagaaatgaaacaggagaatttgattatatccatcattttatcgtccttcttgatgataagcccatcggattctgccaatattacgtgtgtgaaaagaccgttaaagggtacccatgggaacatgagccggctggaacatttggcattgattatttcattggggaagagacgtatctcaaaaaaggatttggaaatatgttgatcaaagcactcgtcatccatatcatgagccatgaacaggctcgtcgaatcattgcagatccagtgccagaaaatcaagtttcaatcgctgtgttggaaaaaacggctttgaattggatgaaggaactgggctttatttcaaagatctttcagaatgaatgttgaaaagcaaggcagttacgaaaactatgctttttatctaagaagtaaataggtgtgttgaagtggactagagacgaaaagaacttttctttaaaagtgttcttggtgcagaaacgaaagtgaacctggtaaaggagtcagaagaatggatcgatatgttgttttattaaggggaatcaatgtcggcgggaaaaataagttgagtatgtctgaattaaaagaagaattaaagaaagacgaatttacagatgttgtcacttatctaaacagtggcaatgttatcttttccagtaacagagaggacccacagattttagccaataaaatgagaacaaggatcaagctcggctttgagttagacattcccattcatgtgattttacaagccgaactaaaagaattattagcaaatgctcctgaatggtggggagatgagaacaaagaaatttatgacaacgtcatatttatgatgaagccattgtcttttgaagttttactgactgagattggtgaaccaaaagcggactttgaaagagtgtatccttataaagacattgtcttttggtcctttattcgcaaagaacatcaaaaaacaaattggtgggcaaagaccgcaaagccaaaggtaaaggatcaactgaccatccgaacagccaatactgtaagaaaaattgttgacatgtgatcaaagaaagtcctgtcaattattggctgattccgctcttaaactcattgtgaaaggtttaggtagtgttctctaattactgggttttattggtcataaattgactttgagtgtcgcttttttcaaagcatggaagaaatcaattgaatgcaaaactattctgaaaattttaattctccgaagaaggagccttgtaatctatttttaatggatttatgcttattcttgaaaggagaatgatgatgaaaaaagcagaattgcatgagttgattacgagtacccagccaaatatttgtcaaattgttgcttacaagaaccacgaagaagtctattcagatgaatggaatcattatcagagaaatgatacttgccatgtgatgtcggcgacaaaaagcgtagtatcgttgttgatcggaatcgccatcgatcagggaaaaatttatagtattgaagataaagtccttgattattttcctgattatagcgtgaaacgaggagaaaaaacgatctatgacgtgaccatcaaacacttactcaccatgcaggcaccttataaaggaaaaggagatccttggacaaaagtctgtactagccaagattggacgaaagcttctttagactttttgggtggaagaaaagggttgacgaatcaatttgattatcgaacagtttgtctgcatattttgactggtttattatgccaagcaacaaaaatgaccacggttgattttgcaaacagctatttatttgaacccatcggcgttagtcgacatcacaattaccatgccgaaacagcagcagaacacaagcagttcactatcggaaaagagccaaaggagccggtttggttttgtgatccattgggtgttggtacagctggttatggtttgtgcttgtcagccagcgatatggcgaaaattggcgaactctgcttgaaccaaggccgacacaaaggaaaacaaattgtctctgctgaatggatcgcagaaatgagtacaccaacgcagccagctctaatccaatttcagcagatgcactatgggtatttatggtggatactagacccaaagcagaatgtctattcagcaattggcaatagcggcaatgtcatttacgttgattcgaaaaacaaactggttattgctgtaaccgcgtatttcaaacctacggtccttgatcgggtcgactttgtagaaacgtatgtgaagccatttgtcctgacagaaatagtctcagcccttcacttattgaagggacgaatggaaaggagcggcgactgcgttccatgagaatcttcttaaaagaacgttgaacgaatgagcatttcttggacagataccaacacaaattaacgataacggaggaactctatggtcaaggcaacgattcgtgccagtattgatcaggatatccaaaagaaatggcaaattgtcaccaatcttcaggactattcctggcgaagtgatttaagtaaaattgaggtgatcaatgaaaggcagtttatcgaatacacaaaaagcgggtatcccacaacatttacgattatcgacaaagagcctttcacgttgtattcatttacgatggaaaacacaaatatgcgagggcgttggcaaggaaaattcaccaaatcaggtgctcagacagatatgatctttacggaagaggtaacgctgaagaagttttatttgaaaccatttgctaaaagatatttgaagaagcaactggagaaatatctcgcagatttgacagcaatcctaaaaagagagaaagaagttacggaaaaatcccattgaaatgtatttcgttgctggctgccaaccgcagcagactgcagcacatcaagcatagaacagacaagaaaatgacttgagacaatcacaaaagaaaaagttttaaaggagttgaccaatgtttactttcgagagagtgactgacgcaaatgaacaggaagctgtttccatctatttaaataatcagccgtacttttctttaacggatgatgtggcttccttgcagttattaaaacaagatatggtagataagcctgaatcagtaaagaaagaaaataaacgcttttttttagttagaaaggatacaaagccggtggcgatcattgactacttagttgactatccagaagagcaaaccgcttatattggattattgctgatcaatgaaaagaggcaaggacacgggaaagcaatcgttcataaattagaagaaattcttctttctgaagggatgacgaaactagccttggccgttttattgaataatcaaccagcgggtaaattttggcgatcgttaggttttcggcccactaaagaaaccattgctcaaatgaatcaaaagaaagtcaaggttctttcttacgaaaaaatttttgttcacccaagatcaaggaactagcgagtctattttcaataagcaaaacgtcagttgactctctacttgagataagggtcaagatgcaatgaggaggggtatcatgtatttttgcacaccacgttgttttatccgtgattttaggatcgaagatatcccaacagttatgacctatagaaatgatttagagtggatgaagtaccaaggtttcaaaaacaggaaaaagctgcgtatatcaaagaactgctgcatacaaaaagtttttctgaaggcaaaaatttagcagttgtgcacactttagatgaacggctgatcggtgatatctatttaaaaaatgaagcagattttttctggatcggttacacgatccatcctcatgagtctcaaaaaggatacggctcagaagtgattcaagcgacgatacagtggctgtttgatcaaggtgttcaatcagtaaaagcagaggtagcgtctggaaatctagcttcgataaaacttttagaaaaacttttttttcgttagtcaaaacggaagaagacgcactctatcagttgcatcgccttgactacccacaacagaaaaataggataaaacaggaacagtgaatcagaaagttctcttcaaacaataaaaatctttttaccttgttaagaagcctaggctaacttggtaaaaagattttttttgacgaatccgcttcacgtttctttgacaaaagagttggtaagtgctcctaatttggtgatggttcgagcaaagattacgcttttctattttctccatttatttaatgcgggcatcattcgctcaaatacggggaataagatcaaataaaacaggaagtttccgctagcatgaaacaaatcaaatacgaagccttgaagataataggctgtaaaagaaggaaactgataaagccagacttccatcatagaaacgatcaaaccgtatagaataccacaaatgaacgctagaagtgcttggattaagcggctttgctttatgagagatatttttcctcccagatgaaaaaaagtaatcatagcagccagtgctacaaattggctgatcgtccaaggccccatccctaaatagatatttgtaccaagcaaactcaataaagcaacgatcaaagcatcagacaaactgcctgccagggctaataaaaataaaatagcactcatgggctgaacgttggggatccagacaaaaaataagcgtccaacgatacaagacgcagtaaggagtgctaatagagaaattttttgaacggaaaatatatggctatgaggctggaacatcgaaatcgccgtctttctaattgataatcattctcattatacatgaaaaaaaataaatttcaagattgaaaaacacattatgtagtgtgataatgaattccggacacaatatgttgagtatgggaaggtggcacaaaaaatgaaatacagtaaacaaacgataagcaagctaaacgaggacattcatatgttcccagaagtctcagcaatcactactgagatgacgaacacatttgaaggaatttctcgcttgatcatgctcgatcgctattctttcaaggatcaaaaccaccaaacattagctaagggtgatttggttattttaaccacaaaagaagatcttcaatatcctgctcgaggcatcggatgggtaaagtctattgatgacgacatggtctccatagaggttgaagaagagtatcgctcagctatagaaaatactgctgaacaagttagtggtcttgtcaaacgacggaaaaatgagatcgaaaaaccactggaactttatttcgaacaaatcgctcgccgagtcgctagagggatttccgataaagagttagagcaggagttgtttcttgagcagttttatcagcagattgccgaacaaaatctgattccggcaggtcgagtactttatggcgctggtactaagtctcaagttacctatttcaattgctttgtgatgcctttcattcacgactctcgtaaaggaatcgctgtacacagacaagaagtgatggagattatgagtcggggcggaggagttggtactaatggttcaactttacggccaaaagcttgtgtggtccatggtgtcagcgggcgatcctctggtgccgtctcttggttgaatgacttagccaatttgacgaatctggtcgagcaagggggaagtcgtcgcggcgcacagatgatcatgatggctgactggcatccagacattttggcgttcattatttctaaaatccagaatcctgcagtattgctgcagttaaacaaaacattgaaaaatgacaccatcaaacagttaatcaatgaaaaacttcattttgatcctttgtcaaaaatggaagaaaaaatgtatacccatattgctcagcttccagaatcatcagataccgagcaaaatgaaatgatcaaggcagcaaaagaaaagctacggcatggaggaagttatacggttaaaaaaagcgacttcctgactggagcgaatatttctgtttgtttgacagaagaattcatggatgcagtaaagaaagacgattggtatgcactgcgtttcccagatatcgataattattccgaagaagaaatggcggaatacgatgcaaagtgggcagaagtcggagatgtacgagaatgggaagccgccggtcataaagtaaaaacctatcaaaggatcagggctcgtgaattgtggaatttgatcactttttgtgccacgtactcagctgaacccggtatcttctttatcgataatgccaataaaatgaccaatgctacagcctatgggcaaaaagtggttgcgacgaatccttgtggtgaacagccgttaacaccttatgctgtatgtaatctagcagcagtcaatttggcaaacatggccgatcatcaaacggggacagttgattttgctaaattaagagaaacggttaaaaccgcagttcgttttcaagacaatgtcattgatgcgaccccttacttctttgataaaaatgagcgccaagcgaaaggtgaaagacgtgttggacttggcatcatgggcttagccgatctactgatctattgtgagaaaacttatggttcagcagaaggcaatcaattagtcgatcagatttttgagacgattgctatcaccgcctatgaagcctccattgatttagcaaaagaaaagggcagttttccatttttgattgggaaagacgatcaagagacacaagcattacgagagaagtttattgacacagggtatatgaaaaaaatgccagcccatattcgtgaaggggtgatgcaatttgggattcgcaactcacatcttttgactgtcgcaccaacaggatcgacgggaacgatgaccggtgtgtcaacaggattagagccttactactccttctcctattttagaagtggcagattaggcaaatttattgagatcaatgcagcaatcgttgaagaatatcttgcgaatcatccggaacaagccaaagatcagctgccagacttcttcatttcagcaatggaactgtccccagaagaacatgttggtgttcaatgtgcgattcaacgctgggtggatagttcgatttcaaaaactgtcaatgcaccgaaagggtattctgtaagtcaggtggcgaaagtctatatggatctctacgatggtggtgccaaaggcggtactgtatacgtggatggcagccgtgactcacaagtattgactttggaagcaatcgacaatgaaataaacactcaagtagaaccagcagaagatcaatttaccacccaaacgaatgaaccagtgatttctggtgacatttgtcccatctgtcatgaaggaacaatagaagaaattggcggttgtagtacatgtaccaattgtaaaattcaattgaaatgtggtttgtaaaaatagatcattagtgattgaagagataagggatatacctgtgtttcagtaaatatttagtatgtttttcgatggataaaagagtagattttaatgacgtatgtcgggaaggaataaataaatgaaaaaattgttagtcgtaatcgtgttgttagggggattatttgtcactagtggctgtcaaggaaacacgcgtacatcttcagaaaatacccaaaatgcacaaagtgtagaaagcacagaacgttctgttgatcagaaacaattaacagctacgattgttatcacgaataaaggtgaggaagtcacctcaaaagaagttgcttttcaagaaaatgaatcactactgaaagtaatgaaagaaaactttacgattgaagaaaaagatggctttatcacttcgatcgatggaatgagtcaagatcaaaagaacaatgtattttgggtctatacagtcaataatgaaatgagtgataaaggtgcccaagagctgtttttgaaaaaagctgatacgatcacttttaatttacaagcattctaactcaccctttaagaggtgtaacatatgttttcaaccgaggtcccccaataaggactaggatccagcaggtctctttggcttgcacgatgtatcgtgccattcagtatcctcgagttgctacttatgttgcagctctttttttcttgatacaaatcaatttgtttttcgctccttttcgttaaactagcgctgaatcatccctacaaacaaaaaaggagtggagacattgaagatccaaaaaaagatacaagcaaaccaagtgttgctgacaataatcagcggttgtctgatcgtcactgcatttggtgggaaatatttattgcagcagcaggtactctatgagagttgcttgtttattgcttctgttattggtggtcttcccattgctatccaagcttatcaagcggcaaaagtgaaagtccttagtattgacttattagtgactgtggcagtgctgggcgccctttttattggggaatacaatgaatcagctattgtgacctttctttttttgtttggtcatgttcttgaacaaaaaacgttagcccatacgcgatcagcaattcaatctctcatcaatatgtcgccggcaaaagcctggaaatatatcccctcagcgaatgaagacgccgttgaaaagacggcagaagtagcaattgaagaagtcaaagtgggggatcgcttgctggtgaaagcaggtgctcaagtgccagtggatggcatgattgttgaaggatcgggctacttaaaagaagcagcagtgacaggagaagctgaacttgttagaaaagcagtaggcgcaatggtttttgcaggaacgattctcgaaaacggtacattaaaaatccaagctcaaaaagttggagaagagacgacatttggtaaaatcattgaactcgttgaagaggcacaagatagtaaatcagctgccgaacgtttgattgaccgttttgccacctattatacacctctgattttggtgctggctgttctcataggcttgattactaaagagattcgtctagcgatcacgctactggtgctaggatgccccggagcgcttattatcggtgttccggtcgccaatgttgcggggatcgggaatggtgccaagaatggagtactgattaaaggcagcgaagtcatggctactttcagccgtgtcgatacgattgtttttgataaaacagggacattgactgaaggcaagccaagtgtgactgccgcaaagatttttaccgataaagacgatttagccttaacggcagccgtagaagcagaatccgatcatccattaggtcaagcgattcttcagtatgcaagaactgtcggggaaagttgggaagcagtccatgtggagcagacgaagatccataagggacgcggtgtacaggcggttgcaaatggccatgatgtgttgatcggtaacagacaatttatgattgaacaagggatcgagctatcgatggaggtacaacggcaggaagatgaattacgaggacagggtcattcaatcgttttagtagcgtgtgatcagcaattgactcaattatttggtatcaaagatgcgattcgttcaggggcatcagaaacgattcatgcactgagaaaaagcggcataaaacggctgatcatgctgacgggagaccatcaacacaccgcaaatttgattggccacacgttagggttaacagagattcatggtgagcttttacctgaagaaaaagcggactttattcgacatttacagaaaaaaggggagatagttgcttttgtgggagatggcatcaatgatagtccttcaattgcacttgctgatattgggattgcgatgggcaatgggacagatgtggcagtcgaaacctctgatattgtattgattcaatcacggatcgagcaactaaattatgcctatcaactaacgaaaagaaccgtcagaaagatgaaagaaaacattctgattgcgttaggaactgttttattcttgttagtaggtttggtctttggcttcatctatatggccagcgggatgtttttccatgagttaagtattttgcttgttgtcttgaacgcgatgcgcttgctggcgaaaccaaataagtcaaaacttgatacaaatcaattattagtgacacaagaagaattaaaataagactatcaataaaggaggaatagtcatgaaatcaattattcaattacaaaccttaacttgtccatcttgtatgcaaaaaatcgaacaagggttgagtcgccagtctggtgtaacaaaagtgaatgttctgttcaatgccagtaaagtaaaagtagaatttcaaccagaaatcatcactccgcaagaaatccaacaagtgatcgaaacgctaggttatgtcgttgaagggattcaactaaaagagttggcttgatattacttgaaacaaaggaatgaagccgaaggaagttaataggaaagggataatggatcttttctattactatcgttaattattttttcgtgtatagatttagccgttagacgatcacgggattaatggcttatttcaaagcagtcgggtaggcttcaacaaggagatttagtctcaacagtattgatgaagaaggaatccttgaatgggtgcatcaagtagtaaacttccagaaatttatgtcaacactagtgctaattggtgggtgtacgatgctcaaaaaaagtggtacattaaaaaagaaacgtcgcgtgttaacatgcatggctgttgagcaatcgcagctgttgttgctgtttgagacattccataaaagaagttcggcaggactgagtttttgagttttctaaagaagtttctgcgtgattgcaaggccattgattccttggataggacaattttgcggggaaactggtaacgaataggagaggatttccatggcaaaggatcatatgtgtgtttcattagtgccattgttcaatcatttagatgaaacggatcaacgagtgattcacatgctggtcacacatcacattaaggaaaaaggggaactgatatttaccccaaccagtgctgatcagttagtgatcgttgctcgtggaagcttgaaggtctatcagctttccgctaatggcaaagagcaagtcctgcgtgtcattgaacccggtggctatgagggagagaaacaaatatttggtgttcgaaacgaactattgtttggagaagcgttggagaaaacagaagtttgtgttctcaaacagcgagattttacgcagttgttgctggattaccctcagctaagtttgaaattattagaaataaatgcgcaaaaaatgctaaaagtcgagcagcaagcacgctttctgatgatggaaaaagttgatgaacgattagcaacttatctactagatctagcaaaagttgccgaatcagatcaagttgtgctgcctatgaaaatgaaggagctggcgttgtttttaggaaccacacccgaaactctttcaagaaaattaaaacgctttgaagagaaactatggatccgccgcaataagcgaacggtgtggctgcttgaccaagatcagttagcagatctttaaagaaagagacttttattcaaaagcacctttaccattcgtttcccgcgaaggggacctcacatctgccaataaatcagtgcaaaccttctgaatttcagtagattgtgcaatcaacgattgacaaacggtcaaaatccaagtagatttaatcaggatgctaaattcttttatcaaagtgatttgttttatcagataagagagggtctggggaaaacgaggtggaaatagtgaaccaaaaagaaaaaatgcttgaactgatcaaaaagaaacaaggtggtggccgttcgaaacaaatggacacaccaaaaaatgatcgcaagaatatgcgtaaaggaccaaagatttacaataagtaataaatgagcgcgactcattgagtataactgcgtaaggaaatcctccttacgcagttttttgtctcttttagagaggggtaccgactgattttctcaacacaaagtactcctcgacttcgccgctttccttttgtatgattaaggaaaagagaataggaacggagtgagaaaatgaatgtgaaagaggcattgatggctggagcagaaaaaagtatttttttgaatgatattgaagtcgatccgaaaaccattaaagcagtattgatcaatgaagtcgttcccctagatccaacagatgatttttatggggcaacagatggcgcttatctttctacgacgttgccgttgtttcaacaagctgggatctatgtagattctgcccatgacttattggatttagggatttatttgaccaatgcgatcaaaacgccaaaacacacgacgacaattgaaacacaaacgatcactgaaaatctaccgctattagaaaaagagttgtcgttatttccaaatattgaagtgattatgctaatgggggatgtcgccaaaaaagccttcaatcaaatcgccaaaaagcagcaaaaaaagaatgcgattccctccgttgcaacatataaaatacgccagaacgaaatctactatggaaagatccgcttattgccttcttatattatgacagggaagaatgtattgatcgaaaaatctaaagtcacgatggcagccgaggatatcgcgaaaatgtatcaagtgattacgaaggaatgatttgattagcagacgatcccatgagctcgcaggatgacagatcttccgctgaaattataggacacactggtgtaagggacttccagcgaactcatgcgaacctttctgtacaagtattttcggatctgctatacttaaggaaatcatttactgaaggaggaaaagtcatgacagcggcaatgaaattgtggatcgatcttttgaatcgttaatttaatactattcaaaagtctaggtgatcgcgatttcaagggatgagtgtctacttttccaattatttatgaagggatagcgccaggctatgccttttttgtgttttcctttttcctagacgagagagggagatcattcatggaaacattaacagtccaattcaaacagatcaaaaaacaatatggcgctaaagaagtcttgtcaattgaggcgttatccgcctatcatggagaacgaatcgggatcattggtagaaatggtgaaggaaagtcaacactgttaaaattaattactggagaaatccagcccgatagtggcacgattcagacaaccacgacctttaattattttgcccaaattggagggatcgaggattcttacgatttttcatccgttgactgggaaatcatgagccgcttttcgttaccaaaacattcaatggatagctggagcggtggggaagccgcaaagacacgattggttcgaacactatcgaactatgaaatgggtcttttgttggatgaacctaccacccatctggatcagaaaagtatttcattgcttattgaggagttgaggcattactatggtacattgctttttgtcagtcatgatcgggttttcttgaaccaattagcaacgaaaatttgggaaattgatcaggggtgtgtacgggaatatcacggaaactttgatgcgtataaacagcaaaagaaaatggaattactgcatcaaaaacatgcgtttgaaagtcacttgaaagaaaagaagcgcttggaagcggcgattgaaagtaaacttcagcaagctgaaaagattagtaaagtctctaaaaaaatgcagcagaaaaatagtcgtcctgatcgattggcatcatccaaacaaaaggatacaattcaaaagaatcttcataaaacagcaaaggcaatgaaaagccgtttggatcatttaggtgagcatcattcattgactgagccgagacaaattatttttccagcaccaaaaggcatagaaattcataatccttatccgataaaaggagacaacgtttcaattcaatatgaacagagagttttgtttgatgattgtgattttcaatttggattaggaaagcgtatcgcgattgtaggtgcaaatggttgtggaaaaacgactttattgaatcatattttaaatgatggtaaaggaattgtcttatctcctaaggtagtttttgctagttaccaacaattgtcctataaaatgactgaatcggaatcaattcttgtttatttaatgaaacaaaccgattattctgaatcatttgtcagaagtattttgcataaccttggtttttgtcaaacagaaattttaaagcccgtaaaaaaattgagcggaggagaagcgacacgagttcaaattgcgctgctttttgttaaaccagcaaatgttctcattttagatgaaccaactaattttattgatcttcctacgattgaagccctggaaaaactaatgagggattatcttggaacagttatatttacttctcatgatcaattatttgttgatcaagttgctaatgaggtctatcaagtcgtcgatcaaaaacttaaaaaaatcacttaaacgtatggccattttcttaatcgcatatgctcgtaacgttgaacgcaaaatcgtgaaagggtttgctgcaactgctttaatgtggtaaagtatagtcataattgaatgaacaggtgatgaagttcggcatagctgatagtacacaatcagtgctataggtatgactggaaaagagtaaataaaatcaattgaacaggctaaaaataaccgcttttgtaggtttatttaagttgcctagctattgattttatcttactctaacttctcttttcacggaagcgatgggtaaccatcgcttttttttattcttttatagtaatcacgcaaaaggaggactaaagaaaactattcagttacacaaataatcaatcaaaggagcagaaaaatgcgaaacgaaatgaaagacttcattaaacagccaaaaatctatcaacaaaccgataccccattctggacagatgactatatttctcagaaaatgctagaaaatcatttggatccgagtatagatggggccagtcgaaatcggtcctttatcaaaaaatctgctagctggatctgtcaaaaagtcccaccagcagattatccaagccttcttgatctagggtgtggaccagggctctattcagaattgtttgctgaatctggctatcaagtaacaggggtagatttctcaaagcgatcgatcgactatgcaaaagagtctgcacgaaaaaaacagttgcctatttcctacctaaaacaagactaccttgagatggaattgacagaaacttttgatttgatcgtgatgatctattgcgactttggtgcattatctgcaaacgatcgacatctgctgacagcaaacatttatcgctggttgaagcctggcggaaaattcttgctagatgtctttagtgcaacgaaatatgatcagactgtagtgcagcaatcatgggagtactcagaaggagctggcttttggagcgagaactcctatcttgcattgaataagaccagtaaatatcccaactttgtctggctagatcaaacaatggtgatcactcaagaggatcagataacttacaatgtgtggactagttgttttacagagcactcattggctgccgaactggctgcggttggatttaaagagtatcagctttatagcaacgtttgtggcgaaagctatacgaaagagagtgaaacaatcgcgatgttgctaaagaagtaaacggtagggttacattttaggggacaattcgctaaaatgaagaggagggataaaatgaaaaaagtcttattgtttctgatgaagcttcctttttctgcccatcaaattaatgcagatttgtgaaggaatatagggtaacaatcaaacaagatttgttcaataaatataaaactgcagaaacatcgttgagaggaggcgtatcatggaagaattacaaaaaataccgaatgtaggaaaggttcttgccgaacacttgcatgcgattggcatcgattcggtggagaaaatgaagtctgcaacagcagaaaccatttttatgcgtattcgtacccagcgggatcccggggcttgtctacacatgctctatgggattgagggagcaatacaaggaattcctaaaacgcagatttcagctgcgagaaagcaagaattgcgaacgtttttccagactgtttcttgattgatttgcaaaaggagtcaaaccaatcagatttgtgatctaaaacacaaaaaagaaggaccatacaatgcctgacaacttccgtgaaaaacattggaagtgtctgattgattgttcggtcttttttgttttttagggcatagctttatgctaattacctttaagcagttctctcaaagtaggcatttcttggacttggtatttttctttaaaggcggcgatttcagctgccgaaaatttttctggatccaatttcaattcctctacaggaagtggacgagcattttcgatcttgatatcaataactacagggccgttgctggtttttgctgcatcaaaagcaggtgttaggtcttcgtaacgagtgatggtatatccttttgcaccaagtgcttccccaactttcccaaagtctgcgccttctagaaagactccaaatttcttttgttcggtatcctcttgttctgcttcaataaatccaaaagaatcattagagaagacgatattgacgattggtaattggtatttgacttgggtcaaaatatcctgcatttgcatggcgaaaccgccatccccactcaatgtaaagacttggcgatcggggaaactcaattgggcggcaattcctcctggaacaccgttccccatcgtagcgaaccagccagaagtggtaaaacgctgttctcctgtcatttctaaatgtcgaatactgttgatcgtcacatttccgacatcactgacgaaaatcgcattcggctcggcaatgcggttaatttctttgaagatcggttctggacgaagaggagcttgttgattggtgtcaaagtgatggcgccaagcatgccagcgaacaatgttttcttgatttgctgccagccattggtctgctggtcgctcggttcctagggtgacccattgattcaacgcagtgatcccatcgcctaacaccgagacatctgtgttgtgccgacgtccaaatttcgaggagtcaatgtcaacttgaacaaaattggctttcggattaaagaaacgacgaccaaatggaaaatcgctccccacgaagacaatcagatccgcttcggctagtgcttcgttcgcaggttttgtggcaactcttccggcaaagccaagaaaatttttatacatatcaggaacgattcctttcgccaaaacagaagccgcaactggcatcgaaaagaactcagaaaattctttgattgctgaaaatccgccgaataccccttgtccaatataaagaacgggtttttttgcttgttcaaaataggggagggcagcttttaagtctgcttcattaggtaggatcaccccagttttatggtttttggctgtggcgatctcttgggcttcaatctctttgaagccaaaatcaacgggaatcgtcacgacagcgacgccccgaaatttataagcagccttgatagcttcatctaccacgtgtggcagactttcaggggacatgaccgttcgattgtagatgctgacatctgcaaacatcggattttcattcatttcttggaaatcattgtaattcattgaacttgatgccacttgaccgagtaatgctactacgggtacattatccatttgagcatcatacaatccattgattaggtgggtagctccagggcctgctgaaccaaagacagccccgactttaccagttagtttggcatcagcagcggcggcgagagcacctgcttcttcatggcgaacttggatatagcgaacggattcgcgttcttggtatagtgcatccattgtggaattaaatgaaccgccgggaatgccataaatgtgatcgatcccccaagcctcaaagacttttaccatggcgacacctgcattgatttttgtcattttcttcactcactttctcctctttctttcagtataaagtattctaaaaaagacaacaaaaaatgtgactcgactcacaagggaaactcccggttatcagcaatcaaattcaacagaggaaaaatagtacaaagaatagaaaacctgcaaaaaaagatgcacctgtgtcagatgcatctaaaatcatggtacccttattcagtcatcagaggcttgttcgctaaaagccctagaagtatgcgattctttatgaaactaattggataattctgtgataaaacgagccgcgatttctttggggcgggtaatcgcaccgcctacaacgatacctgcaacccctagacgctgaacttgtttggcttgttcaggagaatgaattcttccttcagcgatgacgggcaactgttcagcaacaagttgttggatcagttcgagatcgggtccatctgttggctcacggtctttggtataacccgctaatgttgtgccaacaaaatcgaccccagcttggtaagcattgcggccttcttcaaaagtcgcaatatctgccatcagcagctggtcaggatacttttctttgatttttttgataaatgcattgatggttagaccatcgtgcctttttcgcaaagtacaatccagcgcaatgacttcgacaccggttgcaactaattcatctacttcgcgcatcgtagcagtgatgaacggttcttcaggtaggtagtctctttttatgataccgatgattggcaaggacactttttctttgatttgctggatgtctcgtacagagttggcacgaattccgaccgcacctgcttcttgagctgccaccgcaaaaagagggatcacgccgccttcttcggtataaaagggttcccctggaagagcttgacaagaaacgatcaagccaccagatattgcttgtaaaaattctgttttgttcatggatacagactccttttctcgatttggtagctagcgctacgaatgctactaagttgattttgtcaattttgttaatttttcaattaagtcagctattcaaagcggcttctacctttgacttcttcaaagggactatagcatggaaaaatggcttttgtaaatgatttctctcggaagcagtcaaacggccaatgactgcgagggctgtgaagatccttctcgttttactgaaaaccgccgctcattctcaaaaggaacacttcaagcaagaaacaaaataagtttagggctttttctcatcaaaaaagctttcccagaattcagattctgcactgagacagaaatgattctgggaaagcacttttcagttgcaattattttgtagcggctcgtttgaaaacaggaatttcattattagagccataatcattcatagtgatttcttttaagcgagtcagatcttcttctgaaattgtaaaagcaacatcggcgttgttcttcatatgttccatggatactgtttttggtaaaggaaggagatctagttggagacaatagcgaatcgctagctgcggtactgatacatgatattttttagccaaagaacgaaaggggcccgcaaacatttattagtcgaagaatgagaaaatttgcggcaacgttttgaggaactaaaagggactttgaatcgtttagataacaaaatcaagtactatgacgagcaatggcaagagtaaggattgctgcattcccgaaagacgaagggcgtgcagcagtccttttttaactattgtttgttttctcagagattacggtatttatcaatgtccaatggctggttttccggtaataattcgtagtcaagctgattcgattcatcatcatggataatgtgcagcaattggtttgaatccttgatgggtcctaggctgataatagtaaatcggtcattgattacttccaaattctggagtgcccctgtaaaaactttacgtatatggtgcgcagtttttattttttcctctgctttttctaccgcttttgttaaagtaaagccttcatcaaggaaacgtttgatcaactcaactttgatcaccgtgggcagtcgatatttacgtggcgcattttcttcttgaggaacggattggataaggcctttttgttcccagtaacgcaattgacgcggagagatttcacacattcggctaagctcgctgatccctaccagcaaattgtcattttctaataatttacgaaaggtttgagacatgctttctccattcttgtaaaggtatttgtttatattgtaacttgttttacttttgtgtcaagtaggttgacaaataagtgggaaagttttaaagtgtatagtgctgttgaaaaattttgtgaaaagagtgtgaaatatgacaaataatcgtcctttagatatatacggtaaaccgtacaatcgttctttattggttgtcgttttgctgatcggtacgttttgtacagtattgaatcaaacattactgacgactgcctttccaaccttgatgaatgacttcgatattacggcttctgatgttcaatggttgacgaccggattcttgcttgttaatgggatcatgattccaattaccgcttggctgattaataaattcaattcgaaaaatttgtatttaactgccatgacgattttcttaattggtacaattgcttgttttgcagcacctaatttttcgatcttactattaggtcgtttgattcaagctgccggtgttggtatctccatgccgttgttgcaaaatatcatgttatcgatctttccgccagaaaaacgcggttctgcaatgggaatgtcggggatcgttattgggttggcaccagctttaggcccaacactatccggctggatcattgaccactatacttggcgctatttgtttggaatggtcattccaatcgttattttagtattgatcttagctgtcttcttgatgaagagtgttatcgagctgtctcatccgaaaattgatattttttctgccattctttcaaccatcggtttcggaacattgttgtatggtttttccagtgtcggagacaagggctggggaagcgtggaggtcattagtttcttagtagttggggtcttgtttatcgccttttttgcttggcgacaattgcacatcgagcatccatttttggaattacgcgtcttttcatcgaaaacattcacattagcggccattctttcaggtgtgaccaatatggccttggtgggcgcagaaatggtcttgcctttatatatccaaaatattcggggagaatctgcctttcattctggtttgatgcttttacctggggcattggtaatgggggcgatgatgccgatcactggggcaatttttgataagtatggggcaaagcgtttagctattaccggtatgttcattttgactgctgcaacattgccttttgcctttttaacaaaagacacaccgattttgcatatcgtcattctttatgcgattcgtatgtttgggatttccatggttatgatgccagttactacttctggtatgaatgctttgccaggaaacttgatcagtcatggtacagcagttaataatactttccgtcaagttgccagctcaattggaacggcgattttgatcagtgtcttatcaaatgtaaccaaaggaaatcttccaagtgagggcttgttgaaggcaacaccgcttgcttacaaagaaaaagcgatcgaagcaacgctttctggatatcatgctgctttttatgtcgctgttgtctttggctttttaggctttttgattgcctttgcattgaagaaaaaagagcctcagttgactgttcttaaaggaggtgacggcaaatgatgttagtgattgtcgtcatcagtgtaattgcctttgcgttattaaatgtttttgccaaaaataaagtccaaactgttatttcacttctctttggtttggtttttgtcttaagcttaacagcaatgatggccaatctatccgcacattttgggatggaaaaaaccaccacaacgactacacagccgttagtttcaagcaatgacaatgatcagttgccaatgctgttgtatcaacctttgggtgatggaactgagaaaatctatttgtaccgcacagatgagtcgcaaaagaaaccaaaacaaacaagaatggaccatgtgacgaatcatgtcgtcgaagatgccaaatcggcacaaaaagaaacgaaaacgacccgttggacgtataaaaatgatttttatcgtttcttgtttggaatagctgggaatgatgaagagtttattcgtgaaaagaatacgttctctcttccagattcttggactctcttaactgttgatcaagcgaaaaaactagccagtcttgttgaaaaccaacaagaagcgatgaaaacagaagcacaaacttttgttcaagagaagatgcaagccgctttgatggctgacccaacaatggatgctgcggaacaaaaagcaaaaatcagtcaattcactgcagaatttcaaaaagaagcaatagcaaaactgattcaagaagcaaaaaaagaataaaaaaatccctctgctccaagagagtgaatcactcccaaaagttagcttttatggctaacttttggcgaatggttcaatcactctagttgcagagggattttttgttgattaaaaagtgaactgctcaatgcgatcaaaggcttcttttagcattggcattgattgcgtagcagctaaacggacataatgatcaccagtcgtctcaccaaaagctttaccgggaatcattagcacgctagtatcttttaaaagtttttcaacgaaagtaacagaatccaagccagttttttctatgttgatgaaggcatacatacttcctttgacaggagacaaagaaagaaaaggaatagtagcgactcgttgctgaatgtaacttagccgttttttgaaggtttccacgactgctggaacaagttcgtcgtagtgattcaacgcatagattcccgctcgttgtgagggggtaggagcagaataagcaatactttcattaatcaacttggctgtctgattgatggataaaggagcgatcatgtaaccaatccgccagccagtcatagcaaaagcttttgaaaaactgctaaaagtaatcgtccgctcaggcgcaaaagtggccataggaacaaactcttccataaaacaaaaggcttcgtacacttcatctgacaagatcaacaaatcattttcttcggcaacttcagcaattgctttaaaagttctcggcgaaaagacagcaccagtgggattgttgggagaattaatgataatggcttttgttttgtcggtaatcgctgcttttaatacatcaatagcgatctgaaaaccatctttttcaaaggtagggatgaaaaccgggcttccgccagccatttcaacttgctgcttataaggagaaaagtaaggctcatggataattacttcatctccaggatccaagatcgcgcacaaggcaagatacatgccatgtaacgcaccaactgaggcccgtacttgatcgttggagaaagtcaatccataatgggtctgataaaaatcgacaacagcttgaataaaatcggcactgccatcagaagccgtgtattttgtatgtccatttttgacgtccgtaaaagcggcagcaatgatcgactgatcagtaatcaaatcaggatcgccgatggacagatctatcaaatttggtgttttcttggcaatcgttgcaatgtccattagtaaattttcttcgggtgtttgaaatcgttgtgcaatcatcgactgtttcataggttcatctccattttttatagtacttttcttaaaaaatcttgtgtgcggctattttgcggatggtcaaagatcgcttcaggtgttccttgttcttgaatgacaccgtcagccataaagatcacgcgatccgctacttgcttggcaaagcccatctcatgagtcacaacgaccatcgtcatgcctttctcggcaagtgcctgcatcaccgctaatacttcaccaaccatctccggatcaagtgcagaagtcggttcatcaaaaagcatcacatctggatccatagccaacgcacgagcaatagctactcgctgttgttgcccaccagataaacttgcaggatagctagtcgctttgtctgctaatccaacttgttccaaaagtgcgtaggcttttttctcagcggtctcttgatcttgtttttttacttttatggggctgatggtgatgttctccaaaactgttttatgaggaaacagattaaagttttggaataccatacccattttttgacgaatttgatcgatcacaatctctttagccaaaagatcgtttccttcaaattcgatttgaccactggtaggttgttctaaaagattcaaacaacgcagaaaagtacttttgccacttccagaaggtccaatgatcacaacgacttcacccgcggagatttcaagatcgatctctttcagaacttctgtcgcaccaaaattttttaaaagtttttttacgctaatcacttgttttcattctcctttctgcaactcctagtaatcgtgaaagagcaaaagtcaagacaaaataaatcaaggaaacaatcacgtatggtaggaaaggtttgaaactggcaccttggacgacccctgtttggaagatcaattcggagacaccaatgacagagacaacagaagactctttgatgactgtcacaaattcattgccgagagcaggtaaaatgttcttgatggcttgcggaaaaataatgaagcgcatcgcttgaacttgattcattcctaatgaacgggctgcctccaactgacctttgttgaccgcattgatccccgcacgaatgatttcagccacataggcggcactattaagtgcaagagcgatacaacctgccgttaatttggataaatccagacctagtacgccagtcccaaaataaacgataaagatctgtactaagagcggggtacctctcacgtattcaatataaacaatcgcaatccaacgcaaaatttttgacgcagaaagtttcataaatgccagtagactaccagcaatcgagccaaagagtacaccgacaaaggctaaaaaaatagtataaccggctcctgacagataaaagggcagatatttgctaaagaagccttcttcaggtgctcctgtttcttcattgaacattagagcataggcttcatcttgatattgactcaatagatcgttatcgacaatcgtcttgatggaagcattgattttttccaggagcagcggcgcctcttttgaaatagcaattgctgtttctttcgtacctttctcaaagaccacatcgtcggcaattgctaagttatcatttgattgaacataggcttccgccacaggaccttccatcacaacagcatccactttttttgagtttaaatttgtgatcagatccggaactttttgcaaagaggttacaagtgagccggacaactcattcttagctaattcttcttgtgtggtttgtttttgagcaccgacagctacaccgttgaaatctgctgttgattgaaaccggttctgatcttcttttcgaacaatcactttttgttggacttccatataagtgtcagaaaagttgacttcctttttacgttcatcggtagcagccatccccgaaatgacaagatcgatttttccagtttttaatgctcctaacagcgcatcgaaacctaattcttcaattttaagatcgacgcctagatcatcagcgatttttttggcaattgatagatcaaagccgacaatttcgtctttgccatcaatcgtggcatgaaattcatagggggcataatccgcagataagccaacgatcaatgcgccattctgttttattttttcatagacgggatctgttgtttcagcgtgtaccagttttgtggtaacacaaaagaacaggacgatcagtatcattgttgaagcgaaccatttacacatctttttcattcaattactccttttttgttttaaaatacaataatagcttgaattatgtataaaaatacaacaaacgttagaaatatcgtatcatacctttgtgggaagtcaatccctttcttggaaaaatcacgaaatatatttgagttttcagaaaaaacagtgttttctataagtttacaggttgaattgttttttacaaatttgtaatataagaaaatttatttcagaaaatttccggaaattatgaaaatatttaagattcattcggcttttttgattagcttaaaagaaacttgtaacagttaatcgatcttctgtttactattaaagccttatttagcaaggttttaagtctttctattttttatttggtacgttatttaatttcttttatcaaagtgaaatatttcgtcatcgaactgttaccaaggacttaacgtatcttgctattatttatcaagtcgttacgacgaaaacttacatagagcgagggaaataaaatttatgaaatcaattaaaacattcgtattaactacagccacaattgctggttttgctgcattaagtacaactgctaacgcagacgaaatcaaacacgtggtgaaatctgatgacacattatctggtctttctttaaaatactttggtaatttagatcatattgatcaaattgcaaaagacaacaaactgaaagatcctaacatcatctacgatggtacaactctgattattgacaccgacaaaaaagtatcatcagataaccaagcaagtgaacaacctgcaaaagaaaccacacaagcagaagaccaatctgccaacgaaaaccaatctgaatctgcagcaagcagctattctggaacaacgatgacgatggaagcaacagcatatagttctgatccagcagatgttttaggcggcggaactgtgacagctaccggccaaaacttgttggaaaatccgatggcagttgcggtggacccatctgtaatccctctaggcacaagactttatgttgaagggtatggagaagccatcgccagcgataccggtggtgcgatcaagggaaatatcatcgacgtgcatttcccaacaaatgcacaatgcgaacaatggggccgtcggaccgttcaagtaacgattcttgattaatttctccaaattttaagaacagacccatgcacgtatgaggctagggcataagtaaaaacagtcagaaagattttcgagaggacagttgttccttaaagatcgggtctggctcaacttatgcctagcctttttgtatactcagataaaaaaggatgcctctatgaactttgcccaagacattttgcttttttcttgagataatgaatcaaagaggaggcgttcaagtgaaggtagtattgatacggcatggcgaaagcgaagcaaattttgaaaactattggacgggctggctggatgtggccttgacagcaaagggtcgggaacaagcttggcaagcgggagaaaaaatcaaagaattgggtatttcttttgatgtagcatttgcttcttatcttcagcgaaccatcatcacctgcaacactgttttggaagcaagcgctcaattgtgggtacctacctataagacatggcggttgaatgaaagacactacggacagttagtcggtgtcaataaagatgaaatggttgctcgttatggaaaaggtcaagtccaaaagtggcgacgagggtataatgaaccgccgctgtatgtttcagaaaatcattttgatcgtcgttatgacgacttagatccacgcttgattcctaaaggagaaaacctaggaatggtcgttgaaaggatcacccctttttggtcggatgatgttgttcccttcattcgatcaggaaaaaatgtcttgatcacaggccatggcaatagtttgcgggctttagtgaagtatttggagaatgtacctgaagaagaagtcgacaaaatcgatgtccccaatgcagagccaatcatttatacctttgattcacaagctgttttacaagaacggctgggataaagacgaacattattactaaaaaccgcgctttcgtatgaagtttcatcgaaagtgcggttttcttatgctataataagaaaaattttatgaaaggcgggctcttatgaaagcaatattgaccgttattggaaaagacaaggtagggatcatcgcaggcgtcagccaactattggcagaattagacatcaatatcctcgatgtttcacaaaccatcatggaagaatactttacgatgatgatgttattatcgatggaggcaaatgcagattttgaaacgattcgtgagcaattgcataccaaaggcgaaacactaggtgttaaaatcagtattcaaaaccaagaaatttttgataccatgcataaattataggagggcttctatggaaatcaatcaaatactagaaaccattcgcatggttgaagaagaaaattttgatattcgtaccattacaatgggaatctctcttttagactgtatcgatgccgatatcgatcagatgtgcgaaaaaatctatcaaaaaattacgacaaaagccaagaacttggtgcgagttggcgaacaaatcgaaacagaatatggtattccaatcatcaacaagcgaatctctgttaccccgattgccattgttgtggcagccagtcaaccgacgccacaagactgtgtgaaggtagctaaaacattggatcgggcagctgagacagtaggggtcaatttcatcggtggctacagtgctctggttgaaaaagggtatcaaggcggtgatttagcattgatccaatcgattccagaagcgctggcagcaacgaactttgtctgttcttcggtcaatattggatcaaccaaagctggaatcaatatggatgctgttcggttaatgggggaaacagtcaaacaaacggctgaagcctcagacatggggtgtgcaaaattagttgtttttgctaacgcagtggaagacaacccgtttatggccggtgcttttcacggtgtcggagaagcagatgtcgagattaatgtaggcgtcagcggtcctggagtggtcaagcgtgcgcttgaaaaagtcaaaggagaatcttttgacgtcgttgcagaaacagtcaaaaaaacggctttcaaaataacccgtatggggcaactcgtaggtcgggtagcttccgagcgtttaggggttccttttgggatcgtcgatctttctttagcacctactccggctgtaggggatagtgtggcgctcatcttggaagaaatgggtctggaatccgttggaactcacgggacaacggctgcattggcgttattgaacgacgccgtcaaaaaaggcggcgtcatggcctgcaatcatgttggtggtttatcgggtgctttcatcccggtttcagaagatgcaggcatgatcaaagcagttgaaagtggtttgttgaatctagaaaagttagaagcgatgacagcaatttgctcggtgggcttagacatgatcgcaattcctggagatactactgcagaaacgattgctgcgatgattgctgatgaagcagcaatcggcgtcatcaaccataaaacaacggcggtacgtatcattccggctaaagaaaaacaagtaggagaccgcatcgaatttggtggtttactaggcacagcacctgttatgaaagttaatccagctaaatctgctgactttattcagcgaggcggccgaattcctgcgccgattcattctttcaaaaactgatcatcttctgaaactgcgatataaggaacacacaaatcaaatgctctcgattggacgaaaaggtgattacttttcgaacattcgctcataaagacctaatggtattttggaggggatgctagtaaaaaaatcggacattttgtttagtgtagcacttagttcgcagtttcttctttgtgatctaaggctttagccctatgctgatcatctggaaataatatacaattaacgtaattttatacagataggggtgtcaagaatgaaaaagagggtagtgggcagctccatactggtagtgatcgtcatgttcgtgctacttgttccccaaaaagtatttggtcaaagttttgtgaaggataatgcaggggtcctctcagcagagacaatcgcaaaaatcaatcaattaaaccaagagaggttccaaacgttgccaggaagtccagaatacgctgttgtcacgcttaaaaacttagacggccaaacgatcgagacagtaaccaatcagttatttgatgaatacagttttggtcaatccgcgtataacaatggcttagtcttcgtgtttgccatcgaggaccgggaatttcgtttaggctatggggatggcttaacgtatattttttctgatttgtcagatgatgacctgatcgatgaagatacaaaagatcttttgcgtgatgaagactatgatcaagctgttttaaatgcttctgatcgcgtctatgaggaaatgaaaacagcggacgaaacggttggtctgaacaaaatttatgcggatgggcaacagctactggcagaaaaaaaggcccgagaagccgcagagtcaaagaaattctggttgctgttttggcaacttgttagttcagttagtgcattgattattgcagctattagcggagtgataggctggcgcaagcgccaaacgaagaaaagctttcaagcagccaatgtgattcctcctcatattcattcggatccagcgtttgatgaaaaggctttttacagatgggcaagtaaaagaaggaattatcagaccttcaatcactatattgttgctggagagtgtttgaaggcgttaaaaatgtacctgcttagtgaagttattccgaggcaattagctgagtttgaaaggatcagtccgcaaccagctagaaaccaaatgattcaacaagcattgaaaaatccgcagttggccgatcaattcgtgcaagaatatatgaaagatcataaaaatttgaagatctttgggcaagagttagcccaaggccatgacacattgcgaacctatgaaacacaattgcagtggcaactcaaggaacaattacgagattatgatttaactggagatattcttgcagaaaatgcttatttgattccacagtataaaaaagagattcagcagttggcggaagaagaaattcagcggcgtagtcgcaacaacgattatttggctatgctgcttacgaaggaaaagacgtatcctgaaatggtgcagacgagttctcaggaaatagctagcttgattgattctgttaaaacggatgctttgtttactatcgatctccatgaagtatataaaaatcatccagatctacaaaaacaagtaggtgatttttcgggggaagatcgttcagaactattgaataatgctcgtcgtgaatacaatccaaccactatggatcaatctttagtttatttgttactcatcaatcatgtcacgcgacaagaacaggtcatcgcagagagtaaaagctcggatagtgatttcggtggctttggcggtgggtccagtagtgggggcggaatttccggaagctggtaatttttaagggctgtgacaaaaggttgtcatagctcttttttcgaacgcacggtaagcggtcgcttttgcagtaataagccgtaatttcttgcaactaatcacttctgtctcaaccactttgccttttgatctaaagacaaaggcggacttttgtgataaactttgtaaagttgctgaaaaaaacatttttttcacggaaacatttcagcttatttttagaaaatgagggttgtacatgtatcattcgtatatttgggactttgacggcacattgtttgacagttacccaatcatgttagaggcgtttcttaaaacattgaaagacgctggatttgatcccgattcgagagaaatttatcgcatcttgaaagcatcgtcatcaaaacaagtagctgagaaatatcaattggatttcattgattttagcgctcgttttaaagcatatgaagcactagatgagcggctacccgtttcatttccgggaacgaaagaagctttacaagcagtagtagaccatggcggcaagaattatattttgacccatcgtgacgttgtttcaacgaaagaacttttaatgaaagaaaatcttgaccatttgatcgtagagatcgtgggaccggagaataattttccccgcaagccggacccaacgtctttgaattatttagtggaaaaatatcaattggacaaaacaacgactgtaatgatcggtgatcgtgcgatggatgtgctggctggacggggggcaggggtgcaaacgatgttttatgatattgaaggattgctaactgatttggatgcagaccatgtcgttcattccatgaaagaaatcgaagaaattatcaagtcttgagcaatcaagacttttttttgcgtacttctttttgaggtgattcattatggacaagtggttggattttgggaaaaaatattggcatttatccttgagcgcgctgttggttattctttttctatttggtttgttttttaccccgaatgagccagaatggcccgaagcagaagagtcttcaccaattttcgaatcagagagtaggaaagagtcattggatcagatcgttgtagatatcaaaggagaaatccgaaatccgggtatttacaccttacctagtggagctcgactgtatgagctgatccaactagcgggcggggtcactgatgaaggaaatgaagaagtcatgaattttgcccaagaattgtcagatcaacaattagtaatcgttcctcatttagatgatccggtagtctacgctgacaatggaacagaaggaacacttgctcagaaccagatcgatttaaatacagcagatagcagccagttacaagagcttccaggcattggcgcgaaaaaggcagaggcaatcatcgcttaccgtgaagaaaagggtttttttaaaaccgtggaagaagtgaaagaagtttctggtattggcactaaaacttatgaggctttggaagggttgatcaaggtgcgatgaaaaataagagaaagaataagagaataagctcgcgattcagtggcttttctgtttcgttgttgtagggggtatagggagtataggggtataaggggtataaggtaagtagagaagtcatttttatttagtagagcgatcgggtgaaacaagtcagtatcgcgacgtattatgctaacaaaaacacactctgtcgcaggcggccggtggttgtaaaaattaatcttttgctcaaaaagagtcaatcgatacaactatatgttgtatcgattgctaggggatctaaggaatttatcgtgtgaatacaaagtagaccttttctcactgtgtaatccatttgtttatttcatcaggaaaagatttgctaaaggtaagctataccgattacatgaaaaattcttcatttttcccaagagaaaattaaaaataattttgaaaacaatttttttacctaaacttttcctcagaatgctatcaatttcatttcttcctatttcctgatagtttataataacggacgtaataaattcgggaaaggagcgagtctatgctggaaaggtatatagaaaaatgtgtgattcgtcaagtctatctttgcgagcagttgtatgagaaggaaagcgtgcttattgaccgtttagccgaacagctagatgtctgtcctgcgaccattatcaatgacattgataaaattctgcttttactgaaagaacgcattgctatcgccacttacgagaagcatacatatcaagtggtttttactgccggatcttccttatcagagcttactcaaaccatttatcaaggatcctattttttacaagttctctatcaatttttgattggagagagaagttggcaaaaaatatcggaagaggtgtttatttcattaagcaaggtttataccattcggacagacttatggagattttttgaggaaatgggctatttaaatgaagagcaagaggaggtcgagatccctgagaaagacttccgctatcttctattggctgtaatgaactatttaggaaaacgacctgaaaaaaatcagtcttttattgagcaggcttgtgaagaactgatccaattcgtggaacaacgtttttttctgcgttcttatcctgaagacgaacgtcaaatcattcatttagggatccgcatcggattagcaagaggccgaagagctcctatttgttttgcatcaagggacaaggagatggcacgacagacaccgctatttcaattattacagcaaggtcttaaagaacttgtagtttctttgtgtagcaatgaggacgaagaattttatatctattcactttttaattcacgcaagtatcagtgcaataatctggagctgttgcaaagagattttgaagtcgtttatcgtaatcacattcatcgctgtccggagatgttggaactcacgcatttattacaaaaccgactaggtatctccgagaaaaatcatttgttgttcgaaaaagcgttactaccgtttcttcgttccgcttggggggacatgcagatctttcaaacggatcgtctattctttctctatccaagtgagagggaaatgtttgatcaaataatggagagccttgggttatgggcaaaccaaaaccagcagatgattcgatggaatgacaatctggttcgtaaattgacgattttactaagtttgcttcctgatgctgaaaaaactgaacatttggaagtgtatattgttgcaccttctgattttaaatacttgtattatcgccaacagttagaagaaatgttagatgagcactttaccataagcaatatgatctatcaccaattaactgatgtggtggatgatgtctttttttgtaccaaacgaatgattttgtgtgatgcttctctttaccaagaaacacttcaaacgaaaaatactaaaatttatccggtgactttcagcactgtttcctctgttatcttagctatcaatcagacactatatcaacgagtcgaggaaatctttgcaacaaagagtaattgaaaagactgaaaaagataattattgatacaaagagagggattgcgcacagccgtgcgcaatccctctctttgaactaaagtagtgcaagcgaatggcactacttgggacagttccgcaatagaagtaacgttgagagctctaatgattttggggaagtttcttgctagaacgtgttggcctttttaatgagtaaagccgtaggttttgatttcttgttttttatgatagaccagatgagcctgatcaagtgccagcagagcttctttcatgtcttgaatataatcgtgggccatattcataccaaagtctgcacgaatgaccaatcgttggatgatttggtcgtctaaattggctggtaatggataagctggaacttgccaacctttcatgagtaaacggtctgctaagtcatacaacgtccattcccgttttggatcgtctttcaacttgtagcagacgatcggaagttgagcgccatcattgatcatttcgaatagaccggttttttcgatttcttttgccaaataaagagcaactttatgggtcttgtcatgaatcgctttgtaaccatcaaaaccatagcgcacaaaattatagtattgtccgatcaactgagcagcactatgggagaagttgatggccatggttggtaactcaccgcctaaatagctgactttaaatacaagttcttgaggcaagtaagattgatcgcgccaaagtacccaacccacacccggataaacgagaccgtatttatgaccggatgtgttgattgatatgacatttggtaattgaaagtcccagacgagatccggttcagtaaaaggggtatagagaccaccagaagcagcatccacatgaatgtagactttatagtccgttgtttggttgtattgttcaacaagttcattcaatcctttaatgtcgtcatagcgtcctgtataggtgattcctagaatgccaacgatgccgatcgtatattcatcaacatagtccatcactttatcaagattgatcgacaaatggttttcatccatagggacttctctcatctcgatatcccagtagacacaaaatttttcccaacaaacttgataaccgcttgaaatcactaaattaggtttatgagcatttagatcgagaccgagtttttccgcccgattacgccaagcaaatttcattgccatcccacctaacatacaagcttctgaagaaccaatggtagaagtgcccatgaatttttcttctttgcttgcatgccacaaatctgcaatgatattcacacagcgattttcaatttctgctgttcgtggatactcggatttgtcgatggcatttttttctagagtttgtgtcatcagcttaactgcttccggttccatataggtttgacagaatgtagctaaattcaaacgggcatttccttcatcaagtagctgatcttgtacgagctgataggccattctaggttcaacagattgcggatttagtttgtatttcggtaaatcttctccttcacaaacagctccaaaaattggttccaaatagtctgcttcttcgcggttttcttttccatataacatgataattcctcctaatagataaaaaatacggttaatgtttgattgtatacttctcgttttgaacgatgtggtgttctcctcgagcgcttggataagtggcagggttcacatctcctgttttcatatgaaccggttcgtcgatttgagcttctttgccacgtttgtcatgaagttcatagagaatgaaaggtaacaataaagtaacgatgaaactaatcaacaagatgacttggtaagttctgtcttcactggcaggaatcgaagaaggtgggaagaacgaaacgaataatgcgagcagcgacatgatgagccctaatcctgcgattattgtttttccgattgtttttcctggaacattataggtacgaggaagatcttttttcttaaaaagcagaacaaaaaagcccaagaaaaacagcaaataaccaatcaaataaatcactactgtcagcgaaatagctaccaagaaagataagttgtttccaccgccgccaaacgttagaacagcaccccatattgaaacgatgattccttgaatcatgattagcggaacagggacgccatgtttgttgtgctttcgcaaaaaagtcggcagtaatcctcgttgtgccgctgcaaacatacctcttgatgggccaacgacccatgagctgacctcacccatgacaccaaaggcaatcattagtgcgattaacttcactagccaaccaagatgcggattgaagtgaagcaacaacgattcaaaggtttgaatcactccggcactgagagataattctttttgcggaatgaccgcagcaacagagaatccgccaatagcgtctaatgcaatggcaagaatgactagcaaaatcattgctagtggataatttttttgcggattttttagttcattaatgtgggaagcagaggcctccacacccatataagccaaaataaaagagacaaacaccacgagagtagaaacttttgaaaagtcagggataaatgctttttcactcaggggtatttgaataggatttccaccgatgaaataagctgctgctagcacaaataagaggatagagggaatgacgatcccgataacaaatcctgcttttgcaatttttgctgttcttttggttccacctaactgagaaaacgttaagagccaaaaaataatcagcaaaccgatgtacttcatcaatggatcattgttgagggcgggaaaattcagcacataagaaagtgcccctaagatgaagtaaatcatcgtaacaaatccgacagtaatctgaaaccactgaaagaagatcgctgcaaagccaaaccgttcgcctaatgtttcactgacccaactaaatatcccaccgttctgccagccttttaccgtcgacatttctgccgcgcagagtgcaacaggcaaaaaccagaggatacctcctaataataagaagaaaaccaaatgaagttgtgacgtggcaaaagttgggtactcgtacacagtcaggaccatcgaggctgttagtgcgaaaaaaccaaataaagataattttttctcgttcatcaaatcgcttctttctaagtctaatatttttttggcgctgttatcttggaggagaaagctgatgtatgcttctgttcattgtgtgtccacctcttttcttacaaaacgaagtataaaactttttgggtaagaaaatttccaagttttttctgaaaacaaaagtgaaaaagaaaaaaagctggaaataaaaaagaagcgtgtattttgctgttaaaaaaaagcaagagcactcgaaaggcgtattattttatgtacccctgaaaaactagaaataggcagatggtgttgctacaaaggttttatgaaaaatttgcgttaggcaagtgtttcaatgaaagggaggaatcgaaagaagaaagagagaaaaggcgaaaaaactattatacctgggaagagtaaagtgaggatctttcgttccatccgttagtagcatcaaatattagtagcatcaaagaaaataacaagcaattttattcccagtcccttaatcaaaaacaatacccagcaggtagtggagtcattttgagaactgtttgactgacggtagcagtaggaaaaacaagcagaagtgaatggagaaaaagacactaaaattcattagcccctagattaatcagtgggggtatagtatattataaaaaattgtgtactattatttcgcaatcggaaaaatagaaaaaggaggtacgcagatgacaagcgatctgaacaaaaagaatcaatgggttaattctcaaaaccgatcgatagaaggaaataaacgaatcccttgggaccagtattttatggctcaagctgttttactttctcttagaagtacatgctctcggttagaggtgggggcgacactagtcaaggaccgacggattattgccggcggctacaatggctcagttagtggagacgttcattgtattgatgaaggctgctatgtggttgacggacattgtatccgcacgatccatgcagaaatgaacgcattactgcaatgcgccaagctaggtgtttcaaccgacaatgccgagatttatgtgacacactttccatgtttgccttgtacgaaggcgattttgcaggcaggcgtcaagaaaattcattatctgaatgactaccgcaataatcaatatgctctagatttgattcaacaagttggtgctaccgtccaccaagttgaacttgatccagcatattttgaaaaattatcttttggtgccttgaatggggctacacatacaaacatgccgtgaccatttcctttttgttggagtgatcattggttgctgggtaacaggtttctatttgaaatctgttcttttatttattatcgcaagttatcttcttctgggactactgataaaaaaacaagttgctttattggcactttgttgtcttggcagtgtattgatagggggacgtatggtcagttttcaaaatcctcagttggaagaaggatcgctaactgctgaggttcttatctattctgatacgatcaaagtcaatggtgatttagtgacatttgaagggaaactgcctgaaggtaaagtgatggggcgttatcaagtttcttctctttccgaaaaagaccaatggctcagccgacaaaattggcagaaatcactaagagtccatggaaatttcaagatagcagagccaatccgaaacaaacatgcctttgattactcattttatttggctagcaggaacttcttaggcacattgacgattactgagattctcgcaagcaaacaaactgccgggatttcttcgatccacaggtggcgagcagcagcagtgactcacgtgaagcagtttttccctgagaaactggcatcttatataaacgcattgttatttggatataaagatcatgagtttcaagagatccgtcaattattcagtagcagtggcttgctgcacttttttactgtgtccggactgcatgtgtctttctttttctactggttagaacgaggtctgagacgaggaaagctcaccagagaggagatgctgcttcctcttttgcctattatcctgatagccgccattttatttggtggttctatcagcgtgattcgagctgttctcgcttatgggatgaccgttcttttgcgactgttttcctgtcacctttcagcctgtgatcgttacggtatcgtgctttttctaacacttatgatcgacccaaaagtttttctgcaaacgtccgggcagctatgttttttgatgacttttttattgctcatgcaaagaaacgtacaggtttcctcagtaatccgttctcagtttttgccgttattggcagcgccgctgctgatgcacttattctatgaatttcctttgttgggtgggatttttactcttcttttgcttccgttgtttcaacgttttatcttacctagctgttttgctctttttgccgtaagtcttttgataccaaaaataccctatctggatagttggagtgaaacacttttgcatggaatagaggaaatcgtcttttttcttggaagatttgccctcacgactggaaggattcccatagaacttgctattttctgtagtcttcttggtttatttttgtatcagcgacatcagttctttttttgtttcttagtcagtctgtttttaccgctacttttacagcgtctttttgtccctgctgccgttacatttgtcgatgttgggcaaggtgataatattgtcttacaaacagcctttaaccgggaagtgtatgtgattgataccggcggcagtttatcttttcctaaagaggcgtggcagcaacgcgcgtatcaagaaaatgcacacgcctcattgattccatttttaaaaggcgagggagtcaggcaaatcgatgggctttttttgactcatggagacacggaccatctaggtgatgcattggcattaatgacagcaatccctgtcaaaaaaatatacctagttcctggaagtgaacaccatcctcagattgccgcgttaatcaagcagcttccgcaaggaactgttcactggacaaatgtgggtgaaaccattggtcgcgaccttgctatcactgttttagctcctgagtctgggcaaggtgaaaatgaagattctttagttttgaaggctgaaattgagaaatggcgctttttatttaccggtgatttagatcaaaaaggggaagaaaagttgattcaactgtaccctcatctccaggcagaagtggtaaagctagggcatcatggcagtcgtacctccacttctgctcgttttatcgagagcctttcacccaaaatcggcatcatctcttgtggcaaagacaatcgctatggacatccacattctgaagttttggaagtgatggaaggaagaagcatcttgagaatagatcagcaggggatgatccgcttcagctggtcaaattggcatcgtgtccaacagctagaaacatggctagactatcgattagaatgatgataggatggaaaagaaagcgggggaatctatggaactgcaaaaagcgttgcaagagattcggacgaaatctctgcaacctatctatttagtgacaggcacagaaaaatttttacaagaacaagtacgtcaagcatttttgacgcgttttgaagtttcaaaagatgacttgaattttgcttcttttgatatggaaagagagcctttggatttggtgattcaagaagcgcaatcgttgccgtttttcggtgatcagcgattgatctttgtggagcggcctttttttctaacagcagaaaaaaaagccaatgttccagaacatgaccttgatgattttttgctgtatttaaaaaatccaatggacacggctgttttggtgatttttgccgaatatgataagctggatgaacgaaagaaaatcacgaagcagttgaaaaaagcagggatcatcatcgatgtggcaccaatgaaagaagcggatgttcgtcggtacttgcaacagacattgacaaacgatggtattgaaatgactagagaagcttttgaactgttcctgcggttgactgatctccatttatcaaaagcgatgcaggagttgcaaaaattacgcttgtatgcaggaaaagatgcgaagatcacaaaagaaatcgttcagcaattgattcctaaaaccttagaacacaatgtttttgaattgactaatgatgtgttacaaggaaaagtagcggatgcctggcggttgtatgatgacttgttgttacaaggggaagagaccattaaaatcaatgcaattttgattggacaagtacgcttgcttttacaagcgtcgattctgatgaaggtcggctatcaacaggcaaatattgctgagacactaaaaatccatccctatcgggtcaagttagcgatgcagcaggcaagaaagttcaatgaaaagcaattagcagccctttatcatgaattgattgagaatgattatttggtgaaaagtggtcaaatcgataaagaatttctgtttcaattgttcgttttaaagcatggtaaaagacaagggtaaaagaaagccgaagcaatcatttgattgcttcggctttaatttgcttatttcgcaatttttttacttaaacgagatttgtcacgactagctttgttcttgtggatcaatcctttagtctcagccatatcgattgctttaacagcatctttatataacgcatctacgttatcagcaccagcttcaacagctagatcaaattttttgattgctgtgcgcattgtgcttacttgagatgaattcttagcattagccgcttcgcttgtgcgaacacgtttgattgcagattcaatgtttggcatgtatttcacctccaaaaataagttcttatacgtttgaaacgtataaatcaacactagtcattatacctaatgcaagtttcatttgcaataaaagttgtaaagaaattttacttaacacaaaaaaaggtgcttttgccagctattttttcttgttctatattattattttaatcctttacatattttttaatgaatacttacaaaaagtttacactttgttcactttctatgctatgattacttcggaatttttaaatgaggtgtataaatgtgaatatggctttagttataaccatcgtgctctcgttaggcgttattttcgtcaatgggtggacggatgctccaaatgcaattgccaccgcagtctctacgagggtcctacgtccaaatgtcgctattggaatggcggtagtgatgaatttccttggggtcttagtgatgacgtatttcaatgcgcaagttgctgaaaccatcagtaacattgtcagctttgatactgctggcggctttcatgttgcacaaatcgctttagctgctgcacttttttcaatcgtcgtctggacggttgcggcttggtacttcggtattccaaccagtgaatcccatgcattgattgctggacttacaggagcagcaatggcactgggcggattacatgcagtaaacggacaagaatgggtcaaagtactgatagggctggtggtctcaacattgatggggttcattggtgggtttatcatcaccaaattgatcgtttggctcttccggggaacttctcgtcgtaaagcaaataaagtttttacgatcgggcaagcggtcgcagctggagcaaacgcttttttgcatggcgcacaagacggtcaaaagtttatgggggtctttatgctaggtctttactacaataaccttgtagaaaaaagcggcaacggctttacgatccctttgtgggtaatggcgttatgttctcttactatgggaatcggaacctctgtcggtgggatgaaaatcattaaatctgtcggcatggacatggtcaaactggataaatatcaaggtttttcggctgacttaacagcggcaatctgcttgttcttatcttccgtgtttgggattcccgtttcgacgacacatacaaaaacaactgccatcatgggtgttggcgcatcacgtcgcttttccagcgttgactggcgcatcgtgaaagaaatgatttatgcttggatcttgactttcccaggctgtggcttgattgcctatgtaatggtaaaagtattacttgtgattttgtaaggagagagaagaatggcacgaaaaaaaagttttgattattttgcagcgatggagcagctggcaaccaatggtcatttagcggcaaaacgtttttcagttctgataaatgattattcagaagcagcgttaactgaagcagcagcagaaattcacgcattagaaaaagaaggcgatcaagtgatcgcagaattgaccaatgaattatatgattcttttatcacaccgatcgatcgagaagatattttgatcatttctgaacgcttggacgatattttagatggcatcatgggcttgacttatttatttgaaaatcttgtgatcaagtcattacgtccggaaacagctgatttcgctgtcatgatcgaacaggccacacaaggtgtgcagacggcattaaaagagtttcctaaattcaaaaattcaaagacgctacgtcaaatgatcaatgatgtcaatcgtatcgagtctgaagcggaccttttgtactctaaattgaaaaaggcccttttcaccgatgaaaaagatgtcttagaaatcattaaatggaaagacatttatgaccgctttgaaacaatcatcaacgacacagaaggtgctgtcgatattattgacggcatggtcatcaaaaatacctaatttagctaaaaacactgcgatgtccaaaaggacatcgcagtgtttttattataaagatactaaccagtaaacgatcaaaaccgcaccaagtacgatacgataccaaccaaagaaagtgaaatcgtttcgtttgatataattcatcaagaagcggatggctaacacggaaacgataaaggaaacgatcgttccagttaataagataactgttccttgcaagtcaaaagcatttccatctttcagaaatttaaatatttttaaggcacttgcaccgaacatggtagggatacctaagaagaatgaaaattctgttgcgacaaagcgggaggcaccaatcatgattcctccaagaatcgtagcgccagagcgtgatgttccgggaatcaatgctaatacttgaaacatcccgacaattagtgcagctttataagtgaacttgttcaaatcggtacattttggttctttgtttttgtttcttttctcaacgacgatgaagccgatcccgtagatgatcagaacgatcgaaacagagaggaaattatagaagtgagcgtctaaccaatcgtccagtggcaaaccaatgatgacagatggtaagacagcaatgatcactttcgaccagagtgtccaagtgtctctcttttccaatgcatttttggtgggtgaaaatgggtttaatttatggaaatagaggtaaacaaccgccagaatcgctcctaactggatcacgacgttgaacatcgccataaattccgggcttactttcaacccaataaattcatcagcaaggatcaagtgaccggtactactgatgggaagccattcggtaatgccttcaatgatcccgaaaaggatggctttaataaaattcgcaaaaaacatttgttcagtcctttcttgtatggtgaaatacattacatagtatacctgttctaggaaaaaataccaaacacttcctaaaaaaagagcagtttttcttgctgaaaaaatcgtcaagccgaggatcttttcagcaaaaaactactcttacttttgttgattcattattgcaagaaaatcaagcgaggagatcttgtgaaagggcaagtcctttcttgatatattcagtgttgcccacttccgcaattgtgaattcaccattttcataaatcagtcgggtaaccgaaccattatcgatgtccatacgcacgttgttttcgttattgatcaaatgcagcaagaaggcgatcgttagaccatgggacacaactaacgcattgccgccgccttttttctcaacccgatacgcgatgtcttcaaagccggttttgacccgttcagtcaattcatcaaaggattcggcccaattcgctgtgtccgcacgatgaatcgcattggcaacagcctcaaagctgacatggctagcaatcatattatcataatcagggaaatccaacacacgaggaatgacgccccacatttctgcatcataagccccttctaaagacccaaaacaccattctctgattcgtttatcaatatgataaggaatctgaggcccacgtaaatgctcgcccaagatcaagcgcatggtttcgatagcacgaccactatcactggatactgcttccacaaaatcgatctcccggagaccaagcccaagataatggattccttgttcacctgtgcgggtcaatggagtatcacaccatccctgaacgcgctgtaatgtattgaacattgtcttaccatgtcgcacgacatataattctgttcttgccatatcgtttcctccttttacatttatctaaaaaatggatttgtccgtttttcgttttcaatcgtcgttggctcaccatgccctggataaacagttaattggttgggcagaataaacaactcagattggatactcgttaataattgttccaaattaccagttggtagatccgtacgtccaatactgcctttaaaaagggcatctcctgaaacgacaaaatcatcaaaaataaagctgacactcccaatggaatgtcccggagttgccacaacgcgaaaagagatgccgtcaatttgataatcttttaacgccaattcatgctctgcaggacgtgcagtaataccgcctaagtcaggatggcgaccagaaagattttttagaggatctcctaaccaatcttgttctaatggactgacataaacggggatactgtaatagtctcttaagtgatccactgcaccgatatggtcataatgagtatgggtcaataagattgcactaggctttgcttctgttttttcgatttcagcaatgattcgttcagcctctgctcccggatcaatgattaataaatgcccatcttgccaaaccaagtaacaattctcttgaacagggccggtgactaagccaatgattttcatattttaacctcctctgtttcttcttttagtatagcctaaagtattcaaggaaacaaaaaaagctttttaaagattcacagttttgctctttatttaggaaaaagcaagagagcgtaaaatggctcttcttgcgctggtggaagaaaccaaagagaaaatgagattaaaaaaatctgcaaaaaacggcagtttgattaaaaatagggtcgtttttaaaaaactatcccgaaaaattttctaagaaacctccgtaaaaaaaatacactgttatactgtaattaatttaaaaaaccttaattatggaaatagtggaggcagtaacatgaataagaaagtatgtctagttttatgctcattcttttgcagcttgttactcgcaagctgtgggcaagaaaatcaagcaatcaaaacgagagaacctacgacagctactgcgaccaagctcagctccacaaatgccgagaatgtcgacttgatgctgattcaagaagaaagcagtcaatttccgcaaagccaaggtgtctatgatctgcaaggagaagaattgaccatcgtcaaacaatacttgcctatgacagaaagtagcagtgatgaaacgttgagtggttcggcactcaaaaaaagaaatgaaacgatccaagcagactttgaaaaaaattttgcttccgcgaatcttcgcttaaaagatgatccctttgaaatctacgagacgaccttacatggggcttcgttttccatcgatggaaaatatttatttttacgagcccatgggttggaattaaaatttcagtatgatgaagcaaccaatcgtgcctacgatgagaacaatgtgcgctatgaagttcaagtggatcagtgacggatactaatgagaaatgcctgaaaatcagaacagtataagaagtttaagagaaatagatgccacaagaaagtgacaagtcgattgagacaattttcgattgcgatgatgccaagaattaaaacacatcattaggcaagaagagaggttgtttttgatatgctgtaaccattgtaggcattttttaagaaaatgtgaaaaagactgcaaatcctgcaggctttttttgttcgctttaaaatcagtgaagcttccgatataatagctccgagaaggtgatcacgtgtataaaggaaaaattgctgtccgaaaaatcgttgaatttattttgcgccgtggcgatatcgatagtcgcaaagtcagtaaccatactgctcaagaaggcgctcgtatccatcgacgattgcaaaaagaagccggcgatgcctatcaaaaggaagtcttcttcaaaatagaaagcgagatcgaaaaggacaagttgactatcgaaggacgtgcagacggcttattctatgacgaagagaaacaatgttgggtaatcgatgagatcaaaacgtcagaaccctactttgaagatcttcctgaggatcaaatcgatttattttttgctcaagggatggtttatgcttatatttaccttcaagaagaaaagttgacggaaattgaagtccaactaacctattaccagactacggagcagctgatcacccgcgtccgtcgccattttacagtggaagaacttactgaattttatacccacttgatcaatgaatatcataaatggctggtttttcaggaaaattggcgccgtgttagaaatacttcactacaactgttaaaatttcctttcgaaacgtatcgaaaagggcaacgggaattggctgctgccgcttataagacgttaaaaaacggcaagcgattgtttgctgaagcgccaacaggtactggaaaaaccatatcgactctttttcctgcactaaaagtattaggagaaggggatggcgatcgtttgttttatttgacggcaaaaacgatcactcgccaagtagctgaagatgctttaagcaagttggcggataacggcagtgaaacaaaaagtgtgaccctcactgccaaggataagatttgctttttagatgaacggaattgtacgccggaacattgcccatatgcgaatggctattataaccgaatcaatgaagcgctatgggatctgcttcatcatgaaaatcaaatcacacgagaagtgattgaaacgtatggaaaaaagcataccgtctgtcccttcgaactttcgctggatgtcagtgtgttttgtgatgtcattattggtgattataactatctgtttgacccgactgtttatctccgacgcttttttgaggaaccagaagaagattactttttcttgattgatgaagcccataatctcgtcaatcgttcaaaagagatgtattcagcagagattcgtcgcagcacgtttaaagatcttagaaagcaattgccaatggatcaacaaaagcttcgtcgagcattgaataaagtggagaaagaattctctgcgattgaaaaaatcgctgagacggatcattgggagtaccatcatcaaaaagaaccccatgaaacgatgaacaagcaattagcaaagctagctgagcttatgaaagaatggctgccagctaaccctgaacatacggctcaggaagcggtgctgcaaagttattttgaagtgaatcactttttgaaaattgctgaattctatgacgatcattatgaaacaacagtagaggtcactcgatatgagctgactcttcgtcaattttgcattgacccggctccttttctacagcaagtgttagacaaaggaaaagccagcttgttgttttcagccagtttcacgcctcttgattattaccaggaagtgctgggaggcggagaaaaagcattacgctatcgactgccaagtccatttgatcctgcaaatcaaaaaatcctgatcgcaaattacatccagacgacttaccggcaacggacagccagtctgccagcgatcgtagatgccctttatcgaatggttcacgcaaagtcaggcaattatatggttttctttccttcttaccagtatttggacgaagtagcagaagcatttcatcacgcgtatccgactattaagatgctcgtacaggatacagctatgaatgaaacggaacgagaaaattttttagcggaattcaaatacgacacggcggacgctgaagaaaaaacttcgttgataggattttgcgtattgggcggaattttttcggaaggcatcgacttgaagggaactcgtctgatcggaacggcgattgttggtgtcggattgccgcaaatcaatcacgaacaagaactgattcgggactattatgaagaaaaaaaacatgctggttttgcctatgcctatcggctgcctggaatgaacaaagttctgcaagcagcgggacgtgtcattcgtgattctagggatcaaggcgtgatcctgttgctggatcagcgttttcatacaacggcttaccagcaactgtttccattacactggcaacacgcccaaacctgctttcgaccagagcagattagcaaagcaatggaccatttctggcaaaaacaaaaagactctcagcaccgatcgtagaccgtacatgcggtttgcgatcggtacagagagaagtcaacgataatttgtgaattgtaaatcgatcggtaattcaagcttgcgcagcagcgggatgacttcttgtaaatcgtcacggcttttaccagtgacacgaatctgattgtcttgaatctgcgttttaactttcaattttgcatttttgatggcggtcgtaatttttttcgcctgttctttatcaatgccgttgatcaattctgcagtctgacgggctttggcgccaagtgcatgttcagtctgtgagaattggatattttttgtcggaacacttcgtttgatgagtttgctgcttaacacatctttgatttgttcaagtttgaattcatcgtctcccacgattgttaatttattgccatccattttaatttcaactgtcgaacctttaaagtcaaatcgattctttaattctttttctgctagttggatggcattttttacttcttctgtattgatttcagatacaacatcgaaacttgcttcttttgccacaaaagatcatcctttctatttttctttgattttaccatgagtcagaaaaaagaggggagagaaactaaatttttgcaaataatagtttcaattttagacacaaactgctattctttggaaggagattttttgtgaaggagaaatggcattgtgagtaaattatggacgaaacatcagcagtcggaaagactgaaaaaaatcggggttattttgttgtcaggattgaccgcagcgatcgcgttgaatttctttttgattcctgcaaaagtactttctgcagggatgaatggtgttgcccagttgatcgtagcagtcgggtgggaacaattcggcttgcatcttagtaccggtctctttattttgcttttgaatgtgccaatctttattttaggctttatcaaactaggcaaagcttccacttggatgagttttattaacgttgtagtggtctctttaataacgatgattttgcctcaaggagaaatcacaaacaatatcctcgtgaattcgttgattggcggcgtattacttggtgttggagtcgcttattcgttaaaaatgggtttcacaacgggaggaatggacatcctctcattgattttatcaaaaacgacaggtaagactgtcggcaaatatatgtttatgcttaatggcattattgttatgctgtcagggtttattttctcatgggagagcgccttgtacacgatcatttccatttttgctatgagttatgtggtggatatgcttcatacaagccatcaaaaagttacggcattgatcatcaccaccaaagcggaatctgtcggcaagaatatttcaaaacatgtgtttcgcggtatgacattgttgccatctgtaggagggtattctggtgttcctggaaatatgattatgatggtagttactcgttatgaaatctatgatttggaacaagctgttttagaagcggatgagaatgcatttatcaactttgttccgactcaatcgatcacaggacgttttgcaacagacgatgaacagcgtacattcaaaacaaccggagtctttccagaattgaaagttaacaaaaagaatcgtccctaaggaaaacgaaagcaaaagtgtcatttacaaagggattaaaacaagttatgatttgaacagatcatcaaaggaggtttcgactatgccttatactgaagcagaaagcgaagcaatcaaagaacgtgtcttagcagcgttagaaacagttattgacccagaattagggattgacattgtcaatcttggtttaatatatgaaatcgaatttgacggggaaacaggcgatacagttattaaaatgacattgaccactatgggttgcccattagccgacgttttgaccgaacaaattcacgaagcactaagcgatattccagaagtcaaaaatccagaggtgaaattagtctggtatcccgcttggacgaccgataaaatgagtcgttatgcacggattgctttggggattcgttaaggattggtgttgatttaacagcgtttctcactcgtttagtatgtagtctgagccgttttttcggacttcggataccagataaaatgagggtgttttcgatacggataccatatccaatgaggaaaaaacttctgaactcttttattaactttaaaaatagttgataggggagttttttattttgcaaaatttcaggttagaggaactactagaagaaatgctattcaatgaaaaagccagaggaatatcacaaaaaacgattaagaagcatcagaagtttttgaaactgttctttgaatttttgagaaaagagcaaatatactttcttgaagacgtgacaccaaaaagcattcggcaattcatgttgatgaaattagaagatggatgtgctgaaacatatgtgaatagccatctaagaagcatcagagcgtattttaagtattgcgtagatgaagattatgtccaatacgatagaaacccctgtctgcgtgttgaatgggttagagaacgtaaggtaattattcagacatttaatgatatggaaatcaaagaaatgttgggagtagcaaagaagttaacttttttcaaacctcagaaaatggataagcaacacactggctatcaaacaaaattcacaaatcaaagagattacttgctcttacttattcttgtagatacaggacttaggattaatgaggtaatgaacttaaaagatgttcacattactaataaagagttatttattgaaaatgggaaagggaagaaagataggattgttcattgctcacctttgatttataaagagtatataaaatataagcgagtagcaaattccttttttgaatataatgaaatagagaatattgacaattatgtatttttaacaagagaaggtaaacaatacaactatattttagctgaacgagcaatcataaaaattgggaatcaatgcaagattaggaaggctattcgagtgagtccgcatagtttccggcattattttgctcaaaaattggttcgcaatggcattgatatttatagaatacagaaactactaggacatgcttcaataaaaacgactgaggtgtatctgagaagtttaaatattgaggatgaaattagtaaagctgtggactattcaccattgcagacattataaatcttaaagaaaacaaaaaatacatttaaaataaatggcgagtgtgctttgttcaacaataaaaactttaaattattgtttgtaaagttatagaaggatattggatgaatttaaatatagaaaaatgaataaaacattgactaaaaaagttgaatggtgttggcatgctttttttagagtggataaatacatggtgtaccttatattatcaaaacgtttaattaacaattatttatgataacgcttttttgtttttttttaatagtatataataaatattacaataagctattttggaggttatggtaaatgttggttcataaagcatatgatgttacagaggttgtttctgctagaagtaagttaagtagtgagcaaattcaaaatatagaattagtcattaaaatggttttagataatttaccagcaactaaagttttttatcaagtgccacttaacagagaacatgataattatcatcctgttgttaggtataataagaatgtctttaataagaaatttttgaatgacaataatatttctgatgaattagattatttggctaataaattattatttgaagaacaagtagaggacaatgatggtagtaggcgtagaaataaaaaaattaaggaaggattattatttgctaaacatacaaaagatagtttagttttattaaaatttgaagaaacaaaaataatcgacaaaacaacttttcgtccaattgatgggggagcgtcaataattttgtgtaaatgattcttccctactgcagattgtttctaattctcaatcagttggcttagcatttgttcaagttcgccttcggcctgttgaaagcctttatgactgcgacctaggaatttttggttgtaagtatcaaaagacgagactaagaaacgttccatcgactcttcgttttggaactgttccttgcggtggctgtatttcttgatttgcttattaaaggattcaatcaagttcgtagaataaatactcttgcgtatggccaaggggaaatcatagaaagtgagcaagtgatcgttcgaaagaatcgattcaaccacttttggatagctggttttccatttttccgcaaaagcaccacgtgcttccaacgccacctctttagatgaggcttgatacaccattttaaaatcatcacagacttccttacgatcatcgacacgcactttgtgactgatattacgggaaacgtgtacacaacaatgttgaaaacgagctttgggatagaaccgactaatcgctcctaccatcccctttaagccatccgtgatgaacaggaggacatttttcaaaccgcgctcttgaaggtccaataaaatttcctcccaaatcgtgatggattcagtcggtgcaatcgcatagctcaatacttcctttgatccgtccgggcgaatgccaactgcgatatgaatagcttccttggcgacggttttccgctttaacggaatatacgttgcgtccatataaatagcagcataacggtcatgaagctcccgccctttaaacgccgttacctcttctgtaaatgattttgttatattggacatggtttggggcgtgtagtaatgcccatacattttctcaatcaagtctgcgatttccgacatggtaataccttttcggaagaggtgaatgacggtctcctctaacgtgtcattcgtccgtctataagcaggaacagtctgttgcttgaactcaccattgcggtcgcgcggaatctggagatgaagttccccatactcggtcttgaccgtacggtcataggagccgttacgagaattacccgtgttaaaaccaatgcgatcatacttttcgtaatctaggaaagccgttaactccgttttgagaagcgtattgactgctttctccaaatggacacggaataattcattcaaatcgcctttgttcgctagagtctttagaatttctgtagtaaaatcgttcatagggaagtcctcttttctgtgaatgtgttgtggtaactctattctacagaagggacttccttttttctatttacacaaaatattttacactctcattgatggtttaagtattgataaacaatattataaaatagtagttattaataaaaatgtatacaaagatataatgattgttgatagaaataaagttgtagcaaagtattgggcaggaggttttttagaattagagagacaacgtgatgcttttgttaacactagtgatttgttgatttttttagaagaagacaatctaataaataagaatattgggtttactgaagaagaatataaagatttaaagcaacaagtgagagagatactttttgatagcaaaacttttgacaaagatgaccttttttcgtctttaataattgattcaaagacttatcaactgaattctgaagacttatttgatgataatgtatttaaggtgattgactctgagtttaggttagataaagatgttatcatcaagaagtacagtaaaaaaattaagatttcagattctgtaacaattatggtagaaaatttaaataatgaattgaggcgagaaaatattgaccttgatgggaatacactgaccttaacaattgactcaaaatataggcaaaatgttaaaaaaattatagaagaaggaaaaggaaatggataaattcaagtataagtcttctgatataaatggtacctcacttatttttgaaattgacaaagaaaatagtaacattgtgactaatttatttaaattatctgagggtgactataaatatattttaagtaaagctacgttggaaatatttaactcgaataaaaaattatttttagaagaaatctttcttctttcggatagtcttgaatttgaaacattgctaaaaagatatcggaataaagatttttcaaatatagattttttttatgtagatgagggtgtttttcattcaagttcaagaaattttgaagaagaaaaaagtttgtatgctgaatttttagaagacaataatatagttacaaatggaattagagagaataacttgttgattccaccaagtttattctcagaattaaagaaaacaaattacaccaataatatggagttagaaccaattttaaaatatctttctgaggttttttctctttttatgattgctgataaaagtaagataaattttaaagataataatatattttttgaattttcaatttattgtgagaaaaaagaaaatcatgtgataaatgttgaatggaaaaaatggtcttattttaaaacaaatttattctataaatgctatgaatggattataaataagagtaacaataattttaaaaataagactttacttcaagttgtcaaacaatttttaggaaacttagatagccttgagaatgtggatgatattactaatagtttagattctatattaaatagaatcattttaaacgaaacacatgaatattttttacaacaaaataaattgaaagatgaatttatcatgtataagaaaatggatatggaatctaataatagtctaatgaaaagcttgttagggttaattactacaattggtcttgcgtattacagtaaagttataacaatggataattataaattcaatgagacaagtgaaagtttagcaataatatttgtttttggtatgatagctattatgtttttttgttattcttataccttgaattacttccaaaggaaggaatattacacttctttgaggaatatttatttagaaaagtttgtattctcagaaaaagatttcgattctatattagtaaaaccaacattgtttaaagggcactatagatattggataacattactatgtttttatgaaatagtgttggttgcaattctcttttatatcggagtaatttaaaattatcatagcgcttgtaagaagttagaaaaataagaatagatactactttattaatatttaattggaatgaacttaatttgaaacgccatttctaaggagacaatgctatgaaagaaaaaatgttaattaaagaagcactaaaggaattttgcgataaaaataggacattgttcaaagattctgttagcgaacaggcaatttgcgcgtcactatcacaatgcttattattatcgataagagaaaattatactgagtttaatgcttattatgtagatgttgaatataacagagggtatgctggtcaaaggaagtatattatgcaaaaaaatggagatgagctgaggctaaggagtgtggtgtgtgatttggtcattcataatagaggagaacaaacagcacctagagaaaatttaatagcaattgaaatgaaaaaaacctctgattgtataaggaaagttggaagtaagacagagaaggactattttaaaaatagacgtgagtcagatatagctcgattaaaggcattgactgcaaattcgagtaaagccactggagatggattatatccgattaaaaatgaaattaatcaaaaaaccttcgtagaaggatttcagttgggagtatttattgaattgtgcgataaagaaattaacacagattaccctgaaaatttttggaaagagtcaagtattaagcaaattaaaattcgattttttgttgatggagaagaagtcgtaaatgaaaactattccattaaattcaacaacaaatcatttgaaatacattgaaatcctaattaagtttcttactattttttgctctacaaatttgctacagtttacatttgtagatataataaaattatggatactttttcaattagtatccattcctaatgctattagaacagcatttctaattgcttatttgaacgtatggatagtcttatattaattacctataaaactatccataaattcttaaaaatggagggaggaaaatgtcacaaaagattattaatgtcaaaccaattaaagataagaatattttgaatcaatttgcaacagaattatatcaatctaaaaatggtcaaagggatttactgatattcaaaattggtattacgacaggattaaggatatcagatatattaaatctaaaggttacagatgtaaggaataaaatagaaactgaaattgttgaaatcaaaacaaaaaaagtaagacaattgaatctcaaaaaattgacaaataatattattacatatttggctgatattcatgatgaagaatcggaatggctattttatagcccacgagaccactctaagcgactgagtagtcatcaatactataagatactacaaaagactgcagaagctctggaaatggactatataggcacacacacgttaaggaaaacttttgcatatcattattatttaagaacaaaagacctaaccatgctcatgaaaatattgaatcatagttcccagtccatcactttgaaatatattggaattgaacaagaagaaatcagtgcatcacttgatgattttgaccctttaggtaattgaataaaacaaaaaactctgcttgggataataagcagagtttttttattatgacaaatggttcaagttcgtcaatggtttatttggtatataaatattctatctaaattgaaaactgaagtctattttgaatcaagtgtttttctgtttttattttctaatcgaatatttacagtgttataacgctttttatttgttttggatttttcataaagggatatccaatttttgaaagttttatcttctttggttaaagtaattgttgttttatcattatcagttaaaaagaaatactgaattaaataaaatacatcgttgaatgtacattgagaatatgtaatagtataacttttatcagctataaagaaactccattcatttgttttataattataaattagaatatcatttctgattctgtctttccttcctgtattatagtttttaggctgaagtctgcttttaattttttgtattaaattgtcatcagatatagccaaaatgtccgtgtaatcgtagtttcctgttgtataatcagctatattttcattattaatgtaagtcaatcgaaaattcatttgaatagcttctgcaagtaaatgactccagtagtcatttttgtcagattctttcttaaataatgagtctcttttattaaaagcatctttattgatttcaaaagttcgtttccagttttttgaatttactaccatatttaaaactaagtttttttctttttgatgagatgtttgtacggctatgcttgaatagtaaatagtaaccatgttatctaaagaattaataagcttcgattgattttctaaagacttcacattcttaaaatcgtattttttcgtatagtaaattgttttgtcagcttttatgctcttaataaatttattcttctctaaagttttcagtcgttttgataagttgattcgattgcattgtaaaatatttatcaatgttgaaaggtatattccctccgatgcatcaataatttgtaatagctcgtcagtgtctattgctcgtctgttttctgtcattatgtatcactccttcgttatttaattctcataagtatccatttgtaagtatccattttttgatttggtcatcatataaaactatccaaaactttgaatcagatttatagatgatttattgcctctaaagagatgatttataattcataaaaatatatagggctgctatttttagaaaatcacggaggtttcctttgacataaatcatcaaaatacctcaaaataagaaatattcaaaaagtattaatttgatatttaggcttatatatcagtgtatttataaataaataacaatagtactctcgtaagtatccattttggcttatttttgaacatgtaactattatgaaactattaggtaactattatgaaactattaggtaaccctcacaagtatccatttttgactcgtaagagagtgtgtttgatgaagagttgaatcaatcattctcacaagtatccatctcgtaagtatccatttgatttctattttaattataacattgttattttatttatggaaatttgaatgctgtagatatttttttaaaaataaaaaatacacatctgaagcagatgtgtagtgcattgaaatattaattgtcatttgaaccatcataccactcaccatttgctaatttaatagcttgtagatgtattcctgatgcgttaatgacggtagagccatctgccatttccacgaataactttgtcaattcttgaatttctaaaagtactatcttgaatacgagtgatatttgatacatttaatgttccgttaaatgtcgaattataaaaagcgtttctatcaataatatttaagctttcaggtaatattaattctccactaaatattgaattataaaaagcacttgcattaatagtagtcaatgcattaggcaattttatttctccggtaaatcttgaattatagaaagcgtttgacccaatagtggtcaatctatcaggtaatttcaattccccagtaaatcttgaatgctgaaaagctagaccgtcaattcttatcaatccgtctggcaatattaattctccagtaaaaattgatttattaaaagagctactattaattattgttaatccttcaggtaagaaagaagagcgagccgagttagctaaagctttggagtgcttgaatgaaggagataattacagtatcatcagtgaagaaggaaatattattgaagaaactgattatgcctatatttcatcattcactgatgacaatttagcaagttatagagaatattctaatagaccattaggtgttttgaaagtggacttcgagaattagattcaaaatttatctcataaaaataaatagaatacacttagaaaatgaccacaaaaagaaggcttaaacaagcctttttttatttgtttacaaaaatgctcaattattgctatttaaagagttttacttcaaaaaacgtcataatttgacatagtttcatcaatttgtgggtaatcataccctaactttgatttctatgacgtttttttataaatattaagaaaaccttaagtaagtatattgacatttttcttcgaatatagaaacaatttgaatgaagaaaatcagagccggaaatttgtttttttaatgatggatgtatcttctattaagtgatatatattcattataagtgttatttatataactatatttaaagaggaggattctggtaaattatgaataaatcagaagaactaaagggaaaacttatatatttaaataagcactggcatgtttcaatcgcaggtatagcgagagagtcgaatattcatttacaacatctgaataattttaaattgggaaaagatgcattcggcgaggttagactaacacgacttgagaaagtgttggaaagcaaatataaaattttactgaaggagtttaaaaatgaaattatacctaagtaatatcaaaaataaagataaacctgattcttataagataaaaaaaatatcaaacactatattaaataatttagttgatatttcattagaagaatttgctgaagagctggcagaacaaggcaaaacagtcgttttagcagaattatctgaaaataaattatctaaaactacaccaataatcggtcaagagttgattatgttggattttgataataaagacttgaacaatacatatactattgatgatttagaatgtgatattttcatgcagaaccatgcagttttttattatagaacgttcagtgacttatattctgaagtagataaatttagagtcgtttttcaattgaacgaagtagttgaatctaataatgaaattgaggaaatctatcaaaaattgtttacaatgtatccacaagcggatagttctgttggtcaaacaaatagaatgttttttggttctaacagcagttacgagttgattgattccgataatcgattgcttgttgatgatttgctgaatcaggaacagtcaattattgaaacgacagtaaatggcgaagttattgatattaatactccagtctatcttttactaaagtataagaaatatgatttagttcaagaaaaatttgggaatattcatagcaatatctttccagatgatattacagcaagtaattatttcaagacacaaaacatcagagagttccttgaattatctgaagagaaccctttttacgatatttttcatgaagaaagtaatccaagtgcaagtgtttacttctcgaaagacctgcagatatatatttataaatgtttttctgaaagcagtaatttccaaggagacattataagggttttaagcaagtatttaggattaaattcattctcaaaaacaattgatttattaattgacgtaacgaatagtgaaattaattataaaagtgaaattggcaaagctaaacgtgattttttagatttaaaagaccagttgcgataccatcagttagaaacaaatttcagagaattatatcattatataaagagatatgaagacgaagttattgaaattatgaacattatgtttgactttacttatcttgataaaacaactaatgagttaaaatacctaaattatttgtctataggtagaattacacaatacgtaaataaaagacttcataagaataattctaaagataaaatttcaagaatcatgaatcttattattgtaatggagatggtcacgaaattaccttcagatggtataccatcagtattaaaacaagatttgatagctaaacaagaaagaaattccaatcaaattagaacgagtaatatttatactccgagcatcgatttagaatctgcttttgaaattgctaaaattttgaagaagaacaatattacagtcaatagtctaggatttgaagttgtatataggatttttggaaaagaaaaagctttacaagattttccccaagcttatcaaccactaatagagcgagggattttgattcaaagcgagaaagacgaaaatttgcctaaaaataatatggattttgaaaaagcagttactaaaattatctctaaagaattaaagaagaaaggatatatatttgaagaaaatttgattatcctgattgcaagtaaattaaagattaaaaagactacagcaagaacaaaatatacgaaattaagagctgatattatcaataagtatgatttgaaaagacatagaaataatgtagatacagcttttaaattaaagataaaaggtaagtttagttctaaaattattatttataaaatataagtaactgttttagattatagttccattattgtaaagaaatttttatcaatagactatccttaaattactattttgaaaaagtacctctaatatattcaataaaatcaagtgaattttggaagtcatttttagcatataaattagttattctattctatatgctaaaaacgacttggattttttggcttaataggtggaaataatagaggtagtttttcaaaaatgatgaatttctctattctattctatatgctaaaaacgacttagatttttcgttgattttaaagggaatataggtttaattttttcgtttttaattttaagaataggaaatcgttgattttgcggtggcttttgccacctacctaaagagacgtgtatacatctgtttctactcttagaatagatattaatcatgatagtttactttattatcaaaacactgatacagcagtaagtattttgaaataattgaacctataaattctgaaaataataaaaaacgtcatagaaatcaaagttagggtacaatcatacacaaattgatgaaaaggggtcaaattttaacgagtttttgaacaaaaccttttaaacatcaataattgagcgtttttgtaaacaaataaaagaaggcttgtttaagcttttttttgatggtcattttctaagtgtggttcgattatttttatgagataaaaattaaaaaaatatagctaaagttgtttatgaatatattttgaaaggtataataaaataagaagtttaaaacgtaggtatataaaatttatgttagggggcatcgttatggataatttcgagattgatttacccgatgaaaaaagattatcaataaacgtaacagattatagtttatataattatgacttcaattcattttcgttattgccgttgcaaaaggtagcatctcaaacggtcaaccacaatattagggagaagatattttcagatgcaactttaaaaagccaattattttcgaatatttcaaaagtcagtttgctcaacaagttatctaagaatggagaaacagaatatactgcaaatttatcagatatcgccaaagagaaattggcttcaggagaatggtcacttggcgttaggaagaaaacgggagaaacgtatgcagttataaaagatacgttgactggcaaaaataagagcttcctaactattgacaaaaaagtagtgaaggacttaggtgtactaccagaactgtcagctattcaaggacaattagcttcgttatctgaacagattgaagttttaaaccgcaatattcaacgcatagaaaaagggcaatacaatgatagatttgctggttttttctctgcaagacaattagtaatagaagggatggcatccgaaaatgaatcaattaaacagaatttattattaggtgcaatcaaactaagcaatgagacaattggcaaattaatgtattctattcatgaggatgcattagcgctaatagataccaaattaaaatcgaaagatgctaaaagaatagatgaattattgcaaaattctttaaggtatttaaactcttgtgttcaattaaatctgatagtttatacagtgttaggggagcaaaagtctttatatgctacattagcgaattatcattcctttattcaacaagaacttgaaaaagaaaacgatagtggaagaactgttgcatggttgcttgacaatggacatattggcaatgacgggagaatagttgagttgtcaaataatatatctaatagaattgaaatgatatttgaaacatataacaaaaatacaattgaggtgtttgaaaatgaaaagctcgaaaataaagacctgtaaatatcctaaatgtacgaaagaagtaccttcagaaaaatcattattttgtatagagcataataggaatttgaaagataaacgagataagacaattaagatagtaggtttattaggtggtatagctattacaggaacaaatattgcaaaaaatgtgacccagcgaaaatataaacaataaaaaatgttttttattatttatagtgtgatgcagaaaaatttgggggaagtaaatgaaaaatagttttgttaaacaagaacattatatacctcaatttgtattaaaatactttggggatacaaatggaaaagtttcttttgttaatgtaggagcttcaccaattaaaatgcttaagggaagcgctttaaaggtaatgcaggagagagatttttacgaaattaaaaatgacgaaggagattatgtacttagaaactttattgagaaaagatactctgacatagaaagttatataagtcctttttacaataagtttttgaaaatgagtcaaaaagaagattttgatactatttttaaagaaacagttgaaagtgaagaatgggctgaaattgaatcgtctttattactatatttaatagtgttacttattagaggtaaaggactaaaaaaaatatcttattctaaaactaaattaccagaaagatatcagcatattttgcatttgatgtttacaacaaataatgccgtggcagcagaatttgtaaaaaaaatctattacggagaagagcttgagggggtacttcattttataaaagaaaatgaaaataatctatgggatacgttacaaaaacacatcatgggaaactatcagattagagtttttaagacaaaagaaactaacagactctttttatctgataatccgataattattcaaaaatttgaaggagaagattatattttacctctgtctccagaattgtgtgttttcttggttcctttaaatgtagaaggagatttggtgaaaattgatacaaaaatttttggcttggacaataaagctgtgaataaaataaatgctcaatctattaaaaacactgaccagttattaattatttcaaatgaaaatgatttggaatttataaaaaagcatatttagcgttcattattaaaaaataaatataatttcgtggaggtaaagatgttattgtcttgggaaacattacagagggaatcttcaagcatattatttcagggattaaagacactaattaattcaagtattcgttatgaacttaaagaattaacctgcaatgctgggaactatcattttagaaaatagtaaaccaatttatgtcggacaatcaactaatatttctaaaagaataagtcaacatattaaaagtgaaaggtttagaaatagagaaatattatttcaaaaattaaaaacattttttggaagaaaagaaattgaagagtttggatgttattattttggagatttagaaaataaatttcatcatcataggcttttctataatcacggtatgaaatcgacagattggcagtcaattcaagataggtataactatcttttgaaagaggcgtacaattattttgaggagaaacaatcagtagagtgggaaaaatcagttccttcgaaaaaaccaggtgtttatcaagtttataaagacaatgaggttatatatataggtgagggcataaatctaagtggaaggtttgtgatgcatacttcgaggactcgaatatctgttttgcgtagaaaaatcgcaactcaaaagttaggctttaatctgaaaacaagaaagcaaataggttatcatctgagtaatgataataaatgtagttatttatcaccaaaggaagagtttgaggtaaataatttcttgttaaattgtaaaataaaattattagaagttgatataggtcgtatggaactcgaaaaaattttaattgattctataaaaccagagttaaatactttaaaaagtatgtagataagatagattagtacaatttgatttataaaaaagaattaaatagattctttattcgcactaaatattttgggaggagataattattgaatatagattatattctagatgaaaatgtagtttttttgactgaattcacgagcaaaattatggggcaattaccagaagagcgtttatatgaaaatgtagaagataatcgcctgagattttgttttgcagtattccaaaaccagtttaattctctattttctttcttaaatgaaaaaacaaattataataatcattttaatgcagaccctagcagagaattaattatactggttgataaatatgaagaatttgaacatgctttatctagaactgattatgcttttaaaatgattgataattatgtagacactattcgattcattcaaccgcaccttagtaattctggtgggtcaactattccagaagactatcagttactgaatattgttaaatatgaaccaatcatttactttgagaagcgaattgaaattgttaaggagagtagcagtttatattcttctttaaaattggtcaattcaggttcttatgccatggtttataagtttaaagatactttttataatcaaacatttgctttaaaaagagcaagaaaagaactaacttccactgagttaatacgatttaataaagagtttgaaaatatgaaaaatatggattctttatatgttttgaaagtttatagttataatgatgatgtgaatgaatttattatggaatacgtgcaacaaactcttaaagaatatattgattccaataatactaaattacaattatttgaaagaaaaaggttagttactcaactttttaatgcgtttaaatatattcattctaaagggatttttcatagggatatttctttatcaaatatattagtaaaggaatatgatgataaaaccattatcttaaaagtctgtgattttggttatctcaaagactctgatagcacacttactcgccaaaacactgaatttcaagggagtttgaatgacccacatttgaaaattatgggagcggacaaatacactattcaacatgaaatttatgcgttaactctggtaatcttttatataatgactggaagaaagaatttgaataacaataaaaataaagaaatagagaagttcattgattctggtgtgaatgcggatttatctaaaagagtaaaaactttagaggaattaaaggaattatacttgagaacagattggaattaggaaggtagaaaaattggaaatgattgataaagtttctgatttattatataagaaaaaagtgacgtgtaaagaaattgaagaattctataatgagtttgaaaatcatgatgactttcagaatgtaattaaaattctttcggaatcagtacaaatagataagaatcaaattgataaagagatgtatgattctgaatacagaagaaatattaattcacttgaatatattgaaaaaaattaccctaaagcatatcttttttttaagtctggttttgattcaagaaaaagatattaattcaattaaatattttataaaattcaatcggactacagacaaggtgcgcaaaaaaatcctcattgagtatgtagtccaagccattttaagggacaattcaaccgttttttaaggtataatgaatctataaaagttgataaaaagaacagagctagggattgatatcgtcaatttaggtttggtttatgaggtagaattcgatggagaatcaggtcatacagtcattaaaatgacattgacaacgatgggctgccccttggcagatgtcttgactgaatccatccacgaagctttagctgatgtgccagaagtcagcaatccagaagtcaaattagtttggtatcccgcttggacgaccgataaaatgagccgttatgcacggatcgcgttggggattcgctaggggatttgctgattccaatgcagcggctgttagtttcgtaagtcgtttgaaatagtatggatgtataagtacatttcattctctaaataatccgtagaaattttggaactcttttattaacttttaagataagttagtaaaggagttttttagttaaacaattttttattagtatctgttgcattttcaataaggaaacgcgaccccatgcctctgttaaacaggaagctttatagtaaaagaaaagtgagtctgaatttagcgaaatgaacgattttcgtgcgacgactgcttgtcgtttcagagaccatttttgtaaaaaatgataaaataatgatcgataactaaagaaaaggaatccggccaatgctattaacaaagaaaaaactctctcgcctagcggctccctataatgaaggagatatgagtattggttttgccgaatcacaaagtatagaaagtataagcagcaaaacgattttacttgtgaatgatcgccaagtaatcattttatttttgaacttttttcaaacaaaagtcattgatcacatggcttacaccagaaaagatctagtcaatgagcaattaagtcaagggttcaatgggttagacgttgtttggcgttttacagtccaaaataaaaaatggcgttttcgcatactaaagaaaatagtcacactaggaaaaatgcaaagagaattgatcgagcggctctaaaagagggtacgtacctaaattgtaaaagaattttgagcggtaatttgatgaagactgattgtctttttttcaaggatctcagcgaatagagaattgctacaaataaaataatgacgaaacctaaaacggcaattgcattttgcaaactagaaaggtaaactattttcaatgaagaaaggagacgaacaatgttaacgactaaatttggtgaattcacctacgacaatccctttatgaatgcttccggcgttcactgtatgaccactacggatttggaggaacttgcagcatcagaagccggttcttttgttacaaaaagtgccactttagcaccgcgagaaggaaatcccgaaccgagatatgtggatctcgctttaggaagtatcaattcaatgggattaccaaataaaggcttagactattatttgaattttgctttagagaaacaagaagcaatcgctcctgaagcacctttcttcttttctgttgcaggcatgagtgttgaagaaaatattgaacttctaagaaagattgaagctagcaactttcgtggtatcacagagttgaatctttcttgcccgaatgtcccaggaaagccacaagttgcttatgattttccattgacagaacaaattttagagcaagtttttagtttcttcacgaagcctttaggcgtgaaattaccgccttattttgacctggcgcactttgatcaaatggctgaaattttgaataaattccctttaacatacatcaattctatcaatagtattggtaatggtctatatatagacccagaaacagaagcagtagtgatcaagcctaaagaaggctttggcggtatcggtggcgagtatgtcaaaccaacagcactcgccaatgttcgggctttcgcgacccgactaaaaccagaaatcaatgtaatcggaactggcggcattcgttctggacaagatgcatttgagcatttgttatgcggagcgacgatgttacaaatcggaacggaattacaaaaagagggaccagcgatttttgcccgtctgaaaaaagaattgacagaaattatgactgccaaaggctacacatcgatcgatgaattccgcggtaaacttcgctcattgtagccgattagcaaattgctactgaaggaggaatggcatgatccagtttagaaaagcgacgctctctgatttgccggaaatgatggctctctttgagatgggcatacaatccttaaaaaaacaaggctcacctcaatggcaaaatggctatggtcccactcgtgaaaaaatcaaagaagatatcaatcaacaagaaagttatctcttgttatatgacgatcaaattgctgcttctgccgctttagtcaaaggggtcgatcccctttatactgcgataatcgaaggtagttggtcaggggatgggccttatgcatcaatccatcgtgtcgtagtcagtgaccattttagaggcaaacaattgagtgcacatttactaaaagcgctagaggaagaagcgttagcaaaagggatccatgatttacggattgatacctatcaagcaaatattggaatgcagaaagtgatcgaaacctgtggttatcaatatcgtgggcaagttgttttccctattccacacggtgaacgactggcctatcagaaattaatctaattgattggctgaatatagtaatatctgctgtaattgccagaccacaagcggaatggctgagccatactaattccttaatttccttagcgggttcaggtcgaatttgggcagcgtgtttagctcataaataagatgttttttgaaagattgatcatgacggaaagaaagatagcaagttttgcgtagctttattatgcagggcttgctatctttttgtttatttttattccgaatagacgaaattaattaaatgtataaaaatagagagttatcactttattttaatattgtgcatatggtaaagttgatttgagtaaacaatgtaggagaatccaatgaaaaaaagaaaaagtatgcgtaaggcgttggcaatgctagcggctctattgatcacccttggacaaggggtgcctacggttgaagcattgactgtcttagagaataacgcagaatcagcaatagtcgattcaggctcatcaatctcagacgaatcaaatgaatcctcagaaccatctgaagaccgaacggccgattctttcgaaacggcatcaagcagtcaaagtatggaaacagaagaatccattgatgaaagtcattctactgaaccatcgtcttctagtgaaacgactgaggaaacaagtgaaagtacaagtacgtctgaaagtgagacatcttcctcaagtagcagtgcgtcgacaacggattcaactaaggattcaacaacgcctagtatgtcttctactaccgaaaggccatcaggaaccagtcattcatcaaagccaaatgatacgacagcaaattccacccaaagttcttcggaaccaaagacatccaacacaggttcttcagtcagccaattgccgccatccaatcagcctatagcagattcttcccagacagttgatttatcagataaattggttaccaccccaactgattctaatttgaatggctatatcttgccgttgttgaatcagttagcaaatgaacgatccgcagcgctgatttcagaagcgttgaatcaactaggcaaaccatatgaaaaagatgcgcagggtactggatttaataatctttcgttgcctattgctgtttatcatggcgtttttgatataaaagggatcgaaacttataatcagctcagccgggtaggaaagcaaacatcacttgaaaaagccgtacctggagatcttttgttttggaaagacggtcagcaattagtcaaagcagcaatttaccttggacaggataaactgatcatggcagatcaaccccaagcggaacaaatagtcaaggaagaaaaagcggcgacagaaaacaatggcgtacgcatttatactattactgataaacagaatagtactgcggaaacaaaacaattgatccaagaagatcaggtaaacaaaccagatgtagtagttcatttttctgactcgcaaaaagtaacacctcatggacaatcactaatcgctaagtatgcggctagctatgatttttgcaagaatccgcaaacagaagcatttgttgcggcaattgcagaagatgctcgggaactaggcttaacttatggtgtgtatgcgtcggttatgattgcacaggcaattttggaaagcggatctggtcagagtggccttgcttctcctccgtattataatttgtttggaatcaaaggaacttccggtagtcgttccgtttctatgatgacagctgaggataatgggaccggggaattttatacgatccaagctgcttttcgtgcctatacaggatacaaggagtcgttaaaggattacgttcatttactgcggacaggaattagtgggaatgctgatttttacaaaaaggtttggcgttctgaagcaaaaaactacctgcaagcgactgaatatttaaaggggcgttatgcaacggatacgagctacaacaataaactgaattcattgattgctgtctatgaattaacgaaatatgatgaagccaaagctggcagcggcgttgtcctacaatcaaaagaagcgattcccaaagagtatcggcagctgttggtgtttcctgattataacggtgtaaattataatacctcaggttcttatccagtcggacaatgtacttggtatgcttacaatcgggtcaagcaattgggcggcagtgtggatgaatatatggggaatggtggagaatggggagcaaccgcaaaacgtttaggctataaaacggcggctactccaaaagcaggctatctgatcagttttagcccaggcactgctggctctagcacacaatatggacatgtcgcctttgtggaagcggttggcaaagatggcattttaatatcagagggcaacgttattgatggcaaaacgatttcttatcgaatcattcccaatgagcttgcttattcgcaaagtgtcagttatattgccccaaaataaaatttcgaccaaaaactctagcgaatcgtaaaaattcggttgtcaacttctgccacaattgctaagatagagcacgtaaaggacggtgccgaatgaaaaaacgtatcaaaaagaaaaaagcctataaaaagtatatccaagacatattcacaggatatgaagaaatgttggaaaatcctgagctcaaggagagatcctttagttatttgaaagaagaaacagtcttgagacgtgatgaaaacgatcagattcgttttcggactcgggacattgattaaactgcctattttaggcagtttttctttttcaaaaataattgaaagtatttcagaaaaacacttgctctttcatacgcttaatgataaagtagtgaacgttggcaaaacacgccgacagtcaaaacctttcaaaaaaactttttgaaaaaagggcttgaccaaaacggaaacagatgatattataacgaagtcgcaaatttaagaaatcaatttgatgctgatgcagcaacaaaaaagattaaaaaaagttgttgacaaataacaattcatttattattctaatggagtcgctgatgacgcacaggaagttgttgaataaacactttcgaaaaaaacttttaaaaaaagagttgacattcgcttgttaatctgatatgatttaaaagttgctaacgcagcgcagtagacctttgaaaactgaacaaagcaagcaaacgaaccaatgtgtagggcgcttcattatatgaagcaaaatacatgcaagcaatagctagcaaagttaattttatttgagcttaacgatcctatggatcgttcaaacaaatcattatgagagtttgatcctggctcaggacgaacgctggcggcgtgcctaatacatgcaagtcgaacgctttttctttcaccggagcttgctccaccgaaagaaaaagagtggcgaacgggtgagtaacacgtgggtaacctgcccatcagaaggggataacacttggaaacaggtgctaataccgtataacactattttccgcatggaagaaagttgaaaggcgcttttgcgtcactgatggatggacccgcggtgcattagctagttggtgaggtaacggctcaccaaggccacgatgcatagccgacctgagagggtgatcggccacactgggactgagacacggcccagactcctacgggaggcagcagtagggaatcttcggcaatggacgaaagtctgaccgagcaacgccgcgtgagtgaagaaggttttcggatcgtaaaactctgttgttagagaagaacaaggatgagagtagaacgttcatcccttgacggtatctaaccagaaagccacggctaactacgtgccagcagccgcggtaatacgtaggtggcaagcgttgtccggatttattgggcgtaaagcgagcgcaggcggtttcttaagtctgatgtgaaagcccccggctcaaccggggagggtcattggaaactgggagacttgagtgcagaagaggagagtggaattccatgtgtagcggtgaaatgcgtagatatatggaggaacaccagtggcgaaggcggctctctggtctgtaactgacgctgaggctcgaaagcgtggggagcgaacaggattagataccctggtagtccacgccgtaaacgatgagtgctaagtgttggagggtttccgcccttcagtgctgcagcaaacgcattaagcactccgcctggggagtacgaccgcaaggttgaaactcaaaggaattgacgggggcccgcacaagcggtggagcatgtggtttaattcgaagcaacgcgaagaaccttaccaggtcttgacatcctttgaccactctagagatagagcttccccttcgggggcaaagtgacaggtggtgcatggttgtcgtcagctcgtgtcgtgagatgttgggttaagtcccgcaacgagcgcaacccttattgttagttgccatcatttagttgggcactctagcgagactgccggtgacaaaccggaggaaggtggggatgacgtcaaatcatcatgccccttatgacctgggctacacacgtgctacaatgggaagtacaacgagttgcgaagtcgcgaggctaagctaatctcttaaagcttctctcagttcggattgtaggctgcaactcgcctacatgaagccggaatcgctagtaatcgcggatcagcacgccgcggtgaatacgttcccgggccttgtacacaccgcccgtcacaccacgagagtttgtaacacccgaagtcggtgaggtaacctttttggagccagccgcctaaggtgggatagatgattggggtgaagtcgtaacaaggtagccgtatcggaaggtgcggctggatcacctcctttctaaggaatagtacggaagactacacatcgtttgcctttgttcagttttgagaggtttactctcaaaatagtttgttcattgaaaactggatatcgaagaaaatcaaaacaagtaacacacaccgagttgacaagttaaagagttttttaataagttcaacgcttattttcttgagcaaccttctatcgctagaagaagtactcaccgaccgtaaggtcaaaggttaagtgaataagggcgcacggtggatgccttggcactaggagccgatgaaggacgggactaacaccgatatgctttggggagctgtaagtaagctatgatccagagatttccgaatgggggaacccagcatcttttataggatgttacacagttgtgaatacatagcagctgtgaggtagacgcagagaactgaaacatctaagtacctgcaggaagagaaagaaaattcgattccctgagtagcggcgagcgaaacgggaaaagcccaaaccaacaagcttgcttgttggggttgtaggactccgatatggtagttgaaacagatagtcgaaatacttggaaaagtatgtcaaagagggtaaaaaccccgtagatgaaatctggctcacacctaggaggatcctgagtacggcggaacacgaggaattccgtcggaatccgggaggaccatctcccaaggctaaatactccctagtgaccgatagtgaaccagtaccgtgagggaaaggtgaaaagcaccccggaaggggagtgaaatagatcctgaaaccgtgtgcctacaacaagttagagcccgttaatgggtgatagcgtgccttttgtagaatgaaccggcgagttacgatagcatgcgaggttaagttgaagagacggagccgcagcgaaagcgagtctgaatagggcgaatgagtatgttgtcgtagacccgaaaccatgtgatctacccatgtccaggttgaaggtgcggtaaaacgcactggaggaccgaacccacgtacgttgaaaagtgcggggatgaggtgtgggtagcggagaaattccaaacgaacttggagatagctggttctctccgaaatagctttagggctagcctcggaattgagaatgatggaggtagagcactgtttggactaggggcccatctcgggttaccgaattcagataaactccgaatgccattcattcatatccgggagtcagactgtgagtgataagatccatagtcgaaagggaaacagcccagaccaccagctaaggtccccaaataactattaagtggaaaaggatgtggggttgcacagacaactaggatgttggcttagaagcagccaccatttaaagagtgcgtaatagctcactagtcgagtgaccctgcgccgaaaatgtaccggggctaaatagtttaccgaagctgtggagtgcaccgtaaggtgcattggtaggagagcgttctaagggcgttgaaggtagatcgtgaggactactggagcgcttagaagtgagaatgccggtatgagtagcgaaagacaggtgagaatcctgtccaccgtatgactaaggtttcctggggaaggctcgtccgcccagggttagtcgggacctaagccgaggccgacaggcgtaggcgatggacaacaggttgatattcctgtacccgttgtttttgtttgagcaatggagggacgcaggaggctaagaagtacagactgatggatatgtctgttcaagcagtgagtcttagtgggagtcaaatgcttctactttcaaggacaagctgtgatgaggagggaaataatagtaccgaagcttctgatgtcacactgccaagaaaagcttctagtgagaaaacaatggcccgtaccgcaaaccgacacaggtagtcgaggagagcatcctaaggtgagcgagagaactctcgttaaggaactcggcaaaatgaccccgtaacttcgggagaaggggtgctgctctaacgagcagccgcagtgaataggcccaagcgactgtttatcaaaaacacaggtctctgcaaaatcgaaagatgacgtataggggctgacgcctgcccggtgctggaaggttaagaggagtgcttagcgtaagcgaaggtacgaattgaagccccagtaaacggcggccgtaactataacggtcctaaggtagcgaaattccttgtcgggtaagttccgacccgcacgaaaggcgtaacgatttgggcactgtctcaacgagagactcggtgaaattttagtacctgtgaagatgcaggttacccgcgacaggacggaaagaccccatggagctttactgtagtttgatattgagtgtctgtaccgcatgtacaggataggtaggagccgtagagatcgggacgccagtttcgatggaggcaatggtgggatactacccttgcgttatggccactctaacccgcagcccttatcgggctgggagacagtgtcagatgggcagtttgactggggcggtcgcctcctaaaaggtaacggaggcgcccaaaggttccctcagaatggttggaaatcattcgaagagtgtaaaggcagaagggagcttgactgcgagagctacaactcgagcagggacgaaagtcgggcttagtgatccggtggttccgcatggaagggccatcgctcaacggataaaagctaccctggggataacaggcttatctcccccaagagtccacatcgacggggaggtttggcacctcgatgtcggctcgtcgcatcctggggctgtagtcggtcccaagggttgggctgttcgcccattaaagcggcacgcgagctgggttcagaacgtcgtgagacagttcggtccctatccgtcgcgggcgttggaaatttgagaggagctgtccttagtacgagaggaccgggatggacttaccgctggtgtaccagttgtctcgccagaggcatcgctgggtagctatgtagggaagggataaacgctgaaagcatctaagtgtgaagcccacctcaagatgagatttcccatttctttaagaaagtaagatccctgagagatgatcaggtagataggtcagaagtggaaggccagtgatggttggagcggactgatactaatcgatcgaggacttaaccacgattgaaaaaagcaaggaaactcggaagagttttgattcttcgatccagttttgagtgagcaatacttactcaattgaatagtgtggtggcgatagcgagaaggatacacctgtaaccatgccgaacacagaagttaagcttcttagcgccgattgtagtgaagggtttccctttgtgagagtaggacgtcgccacgcaagttaaccttatatcaaatatttgatataaggtttttttttgtttaaaagtaacgggatcagcgatgagtctgccaaaaacatggtgcaaaaaatttaggtgacttaaaataactttttttgcgaaaaaatgatacactgtttatgaagagtttttaggagggatagtatgactgaggagcttaaaaaagaacaggatccagtagacaatgaacgtaacgaaacgtcgtcggcagttccatttacagaaatcaaagaagtcgcttcaaaaaatattggtcagatgcttcaagacctgcaagcgttcgaaacagcgattgaaaaggaagacattccggagatttatcgaatctacaatggccgcctgcacaaagaattgaaagaaacatccaatcaaaatcatgaaatcgatgagttgctggcgcggaaaatccatgacagttttgtcgctacttttccattcatgatacatgccgatcgaatttcacctacggttcattattataaaataggtgaatactaccatgaacgtccgacaattggcattgatgccagtgttccagaaatctttgtgattcctgctattgatgatgagtggcgtaaatttcaacgcggcaatcgtgatatgctgacagccattgaacaacagatggataatttagacgccaaagccattgcggctcaatccgagattcaaaaactgcaagaggagatcgatcgcattaagcgtagtgaaaacgagttgtcagaatcaaaaggattttttaatcgcggaaaaatcgatgaggaattagaagcattagtccaagaacgaaaaaaagtagaagcgaaacaaaaagaatggtctcgctattcccaaaacgaacaagacgtgcttcttgaaaaagaacgattaatgcagcaatatcacgccttgcgcttaaaaaaggcaatcgtcgaaaaagaatttcgtcaaatcgatcactattttggttcgttgcaagagatgaacgaacgattgcaagctttcttaatgagctatctaggagaggagtcgatcgcagatgaataatgaggaagaaaaaacgcccctaatgaaagaacaaacagaagatgggattcgcgaaacagctacgtcaaagagcgaactggaaataatggaaacaaatgagtgggcaaccgccgctgatgaactaaaaacagttgaaatagaatcggatgagcttgaagcaacggcaattgatcaggaagacttgtaccaacaatctgctgaagaaggccatagcgaaaggctaatcattgactctacagagtctgcagagcttgaaatacctgaagcacctgaagcacctgaagcacctggagaacctggagaacctggagaacctggagaacctggagaaccttatgatgaatactatgaaacgaaagaaagcgatcaccaaagaattgaaagcttgattgaacaagcagaaattgaattagcagatttgcgcttacgcaaagccattatggaagctgattttgatgaattatgtcatcactaccaaacattgatcattggcaaccaggatatttcaattatcgcaaaaaagacgttactggaatactatgcttatgaattcttgaaacccttgcgatcgattggattgatgccaaccgacaactacgatgtttggaaaacaaagcacttcttggtgaagtttcaattgaatgaggaaaaagcaatggatttatattttaaattaaatccgatcaattctcaatatgaatcacagtacttgccgctactcacgatttattctgacacacgagaagtgcgggtcaacgaccatcaaatcttatatctattgcggcaatggtatacagataaaatatttacggtcaatcaattgtcactgtttaattacgatatcaatttactcttaactcattttcgcgcatcttcatttatggtttcaccaagtctcattgataatacgcaagaacttgcagtggatttagagactgagtttccgatcacaacagacattttggaccaaatctttattactacgatggaaaatcaaggctatgattttgtcaaagcagagtatgaagactatgagatcttcttagataaaaaacaacgcttgacgattcggatggctgatgatcggacccatttgtttattgattcagatcgaagaaaacgttccttgttagatttcttcacttcttacgaatttttagttccattagtagtacctagttattcgcattaaacaagcataagagctaaaataatcattaaggttattttagctttttttaggagaggagaatgatgtaatgttgaatcgtgcgatcggattttatgagggaatgcctttagataacagcaatgtttttcaaacgaaagatttggacatgccttcaataggagcaaatgatctattgataaaagttgaagccgtatcggtcaatcccattgatgcgaagcgtcgccaaacgacgaccaaatctggtcatttcgtgatccaaggatatgatgcttgcggaatcattgaaaaagttggcgatcaggtcacagaatttcaagtgggcgacccggtgatgtacagtggaacaacacagcgagacggggcgaaccagaaatatcaagcggtggatgcacgcttagtagcgaaagtctctttagaaaatttagcggaatgggcagcattgcctttaacaagtatcactgcctgggaacttctatttgagaaatttgggttgattcctaaagaaaaagccaatcaaggaaaactattgatcatcaatgcaagtggtggagtgggatcgattgccgcccagctggcacattggtccgggcttgaagtatatggcactgccagccccacaaatcatgaatggctagataaaaatggggtagcgcacccactcgattaccattacccgctacaagatcaggttgaaaccacctttgactatattgctgtcttttatgacatttccgattacatcgatcaatttgctcaattgatccgcccatttggtaaaatcggaatgatcgttaatacgcgcggtccattagatcttaacccatttaaaaatatcggagtggacttttactgggaatatatgtttgcaaaaaccgattatcaagtggatttggctagtcaaggagcgatcttaaaaaaaattgttgatctagtcaatgaacaaaaaatccattctacgatcaccacctgttttgaaacaggcctgacgatcgaaaatttgattgaagcaaccgcattagtagaaaaaggcagtccagggaaggtagtcatctccggaggattccatgagtgaggaacaagaattttgggatgattttgcggcagaatatgcagagatccagcaagaatcacaattaacgattgctgaggatttagcaacatttttaaagacaaacggaattttgccaataagctcttttgttgatttagctgcgggaagtggccgctatattccagcgattttacctgatacaaagcgttatttggccattgatttttcagtggaaatgttgaaagcagctagacgttatgtaaaagatcctcaacaaaaagtagactttcgactgcaaacacaagcagagtttcttgctgataagatcacctatcccttgatatttactgcaatgaatccagcgttgaccgagaaagatcagctgatttctctggtagaaaaaagtcgtcgcttattgattttgcggatcgttcggaccaaagaaaatatctttcaaccactggaacagaacgatcacaaagatgaaaagctactttctgtctataagaaatggcttctggaagaacaaatcagtttttctactcatcttttttcttatgcttatgaagaaatcattgatcgggaatttttttaccgctattttcaactggatattccacagtcagaattgctgcagctaagccgttccctttttagagaaaagaaaaaagcaattagtaagacggagatcgattatgaactcctaatcgtttgaaggcaagcagttgtcctgtatattcagggacagctgcttgcctactagtgtctattagcctatccctaaatagagatagccgattgaaccgattatgaataagtaaaggatattcaccatatagaacttgtgttggaatcttttttgttcttgagggagagcttgcttgatcaatttgtaaccaatcaaattcgctaacgaagcaatcaatgtgcccaagccacccacatttacccccaacaaaacagctttcttgtaggttgtaaaaggagcaatcagaatcgctgctgggacattggaaatcacctgagaaagggtgatgctgcctaaaaaggcttgttgttctttttggaagaagggttggatcatttcaatcaacttgtcttgttcgttgatatttccgataatcacaaagaaacaagcgaatgtgactaagagacggtaatccactgaacgaaagagctctttttgaaaaaaatagaccacgaatgctacgatcgatgccgagaggacgaaaggaacgacatgaaagattcccaaaatcatcagtgccattaaaccaagataaagtaccatgtattttttctcaaaaaaatgcgtggtttttttgatgatgagaggggatgctggcaataattgaatggatcctactaacagagttaatgataggacaaccatcatacctgtcgtttgcaaaaaagtagtcaaaggtaaattataaaaagaaaacaagaagagattttgcggattcccaaagggaaataaactgctgcctaaattagcggctacaatcaggtaaactgcgccgagaagaacgcttttttgttcctgaatgcctttggtgatcagaagatacataggtagtaaagtcaggatcgccacatcgttcgttagtaccatcgagctgaaaaaacttaataaaacaatcgttcgaatcagtgctcggagagaatgactcttagagagcaaacgttgaccaatgaaattcaacaaaccggctttttcaagcccattaatagtcagcatgagaccaaacaaggtcaaaatcacttgaaaatcaataaagtggacatcaaaacgtccaaatgaactcgcaacaagcgccaaaaagaaagaaatcgaaaataataaatcgctttggaaaaagaagaatattttttttaacatgcgtgctcctttctttcaaattttaccatggactcttttagagaagcaaagaaatattctcggttttgacatatactgtgaaatcctatcgctcaatatggttgacaaacgaagcgtttattgggaaattagaactagaatgaaaaaggagcagaatcgatgaatttgatgcaactattagaaaaaaatcagcaagtccattttcagatattgaccatcttctttcagcatggttcagaaatttcctataaaactcttgcaaataagttatccatttcttcaccgacgctccaaaaggagattcagcatttgagtgacaatctttctgttttccatgcagaggcattgttagaaacaaaagagaatgatcgtttgcatttaacattaccgcttgatttttctattcagcattttttttatgcgtatttatcagaagcggtggattttcaaattattgaatatctctttttccatcgcgaaggatcgacaacgaaactcatgttggatttgacgcttagcgaggcctcgctttttcgtcatttcaaatcgatcaatcacttgttggaggaatttagtcttcaattgaaaaataagaaactgatcggcgatgagcgccaaatccgctttttcttttattcgtttttttcgcagagttatccgttagcaaaaatcaatgaaacctttaagagtccagctattcgaaacttgattcgggtgattgaacagcaacttggcttatcaattgatccacggaataattggaaattggtcttatggtttggtttgatggaagcccgtttcgattttaggagttcccagcaacatgagtcatcgaaaggcctcttaaaacaagtagaaaatgatcctacttttcaagtgctacgaaatattttaggacgttatctcagccgttttgccatttcgtggagtgactacgaagctgtttacctctatttgtttttgatgatggaaggattagtagtcatggatcaccagcaggacactgattcggaatttatgctagatttagccgctgagagtcaagtattgatgaaaacttttgcggatgaatctcttgatatacaagttcattatccagaaatcagtcgttttttagcaatcatcgttcttagagcacgctacttgaagggctcgttgacttcatttgccgattttcctccgcattttttgcggggaaccatcacggaagtagcgaatcaagcagttgaaacattggcacaagccactgggcctttttctgaggagaaacagagaaagctcatccatgatttgtcgtttgttattgaatggttgcaagagaaacaacaaaaagagctgaaaatcggtgttctgctgtctcaaaatcaattacgtacggatgttttgcggcggtttttggccaaacagctttctgggtatccttacatgcaggtggaaactgcacaagcaaccgattatgatctgctgattgtggatcaaccgcagattgccgaaaactatcactacaaaaagctcctggtcttgacaggtgtgatcgatcgttttgaagagcaacggctgcatcaagtgattgatgaaattcgaagggaaaatcttgaaagtgagttggagaagttatgaggattgtcattattggaggctctcatgctggtatagcagcagcccgtcatttaaaacagatggatgataaaattgaagtgatcatcattgaaaaatccaatgtattgggctatatcgctagcagtttgaacttagtattagagggatatattgagcgtctagaagattcccgcactgctactgccagtgaattactgtcagaagggatcaatgtgatgctcaatagccgcgtcgtaaagattgcagcggcagaaaaaaacgtttcttttgaaacatcaacggctagttgtgtcgaaaaagacacgatctcatatgattatttgattttagctatggggtccagtaattttcggaatgcttttacggaagaagtcaaagagcacattaccacgtacaaaacgattgcccagtctcgagcagctctaagcaaagtacaggaagccaagaaagtggccattgtgggtgccggtctgataggttttgaattagcggaatcactaagtggacaggataaagaggtcttcttgattgatcggatggatactttgcttttccgctacttcgaccaagagatttctcagattttgatcgaacgttttccagaaaatttacaaatctatctgaacagcagcgtggtcgcagcaaaacaaactacgaacggagagctggcgggaattgaacttgccaatggcacttttttgccagcggatatcgttgtctatgcagtcaatccaagaccgaatgttgacctggtcgctgactttctgaagttgaacccagatgggacgatcgacaccaatgaattcttgcaaacttccgatccaagcatttatgctgtcggcgacttagtctcgatcccattcaatcattcagacagttcactctatgtaccgctggtgaccaatgcgtatagaaccggtatcgtcgcggcaacaaatattttgtctgcaaaaaaaatcccttttcctaaaatgcagcgcacagtggtcagcaagctctttggatattttgtgagcagctctggaatcaatgaaacggaagcaccttattatggctttgacgtcgattctgtcacacgtacgttccatgcacgtacgtttttcgaagtagaaaataattttgaagtgacattgaaactggtatttgacaaggaaacacgagtaatcatgggagggcagatcattacaagcgatcgcggcagtttggagatcatcaatacggtctctacgttgatcacatcttacatgactcttgatcaattggctacgatggattactttttcaatccaacgatatcttttccgctgcactttttgaatcaattggccatcgaaggtctcttgaaatctcatgtgaattaaatgtgttatatattaaaagtttttttattcgataaacctacgttaagagtaggtttatctttttttttgcaaaaagccttgtcattaaaagcggaatcgcttaaactaactagagagaatgagaatcgttctcattagaaagggttagtatatgagaaaaatgagtctggccattttgcttctcttgttgatcactgggtctttatttgtgggcgcacatgacatgtctctagctggtttaatggcaggagaagagagtcattggatgatattgctgaaagtacgcgttcctcgtacgattagtctcttgcttgcaggggctgtcatgagcttatgtggaaaaatcattcagcatctgatgcaaaataaatttgttgcagcagacgtgatcggtttgactgacagtgcccgcctagggatcttgatcgtcatgttatggctgcccaatgcatctggactcctgcgaacaaccgctgctttcttattttcttatgcgggggttttgctatttttatggctaagtcgcttgatccctaagaaagatccgatggttttgcctttaacgggtgtgatgttcgggaatgtgattggcgcagtcagttcctttcttgcgtaccgctttcaacttgtgcaaaatgtttcttcctggttacaggggaactttgctaccgtgatcgagggcaattatgaattgatttatctgacactaccaatttttgctcttttgtatttccttgcctatgaaataacgattgccgggttaggagagacagctgcaaaaaatcttggcatcaactaccacgttttacgcttgctcgtatttgcactggttgcttttgccagtagtgtggtcttgcttttagtaggcagtgttccattccttggtgtgatcatccctaatatcgttgctttatttgcaggagaccatgttcgaaacaacctttttctgatcagtttttccggcagtgcctttttgctcttgtgtgatttgctagcaaggattttaatagccccatatgaattgccggtcagcgttgtagcaggaacgattggcggtattagctttctagtcttattgatgaggagaaaaatggtatgagaattatccggcgttatatgttcttgttcatactcatcgggatagctgttggcgcataccttacctacaatacatatggcaattggtccttcgcactgcaattacggggaaagcgaatagtggcctttggcttagtagcaatagctgtctcgtttagcacgatcactttacaaacactgacacaaaatcggtatctgactcccggtatcttaggattggatcaattatatgtgctgatccagacgatactatttttcttcttaggaggaatccgcatgttgagtcaggaaacacctttcgtttttttgttttcgattttagctaccgggacattaagcagtgtcatcattcagaccttttataaaaaagccaataatcaattgtttctattactgatggcgggaatgatcagcggtactatgttcactagtatcagttcatttcttcaagtcatcatggatcccaatgaatatgatttgttgcaagggcgtctatttgcaagttttagcaatgtcaatagtcagcatttattactggctgctggaattattttaattgggctgattggattatcgctattgattccagaattgaatgttatggtcttgggtgttcgaaatgcaaaaagtttaggcctatcggtttcaatgatccagaagagttgtcttttcttgctgtctttattatcggggactgctactgctttagtaggaccatccgtctttttaggatttgtcgtggcaacgattgcctatcagttatttccaacatataaacatggcacattgtttgttggatcagcacttttagggtttttattactagtcggcggccaattttttgttgagcaagtctttcaatggaacacaacgatcaatacagtgattcaatttttaggcggaatcttctttttaggaaaactagtcaaagaaaggaaaggacaatgattgaaacaaaaggaatcgaaaagagttatcaagacaagcgcgtgttgactgatttgtccttgcagttgccggaaaatcaattgattgcctttattggtccaaatggtgccggaaaaagtacattgctttcgattatcagccgcatgttggagcagactactggagaagtttatttcaaagaaaaggagattcgacaatggcgttcgaaagaattagctaagaatctcgcttttttgcaacagagtaacggttttacggttgatatgaccgtagaagaactggtgtcttttggtcggtttccctataatcggggacgatcaacgccagaagatgaacaaatcatttcagaatcattaacacttttatctttagaatcatttcggcaacgctcgatccatgcattatctggtgggcagcttcaacgggtctatttggcgatgattcttgcccaagataccgagtatatccttttggatgaaccgctgaataatttggatttgaaacatgccaatcagttgatgcacttattggagaaattagtcaaagatcatgggaaaaccgtattgatcgtattgcatgacatcaactttgctgccagatatgcagaccatatcgtagcgatgaaagaaggaagtgtgttcaaaacaggcacagttgcagaagtgatccaagagcctgttttaaaagaactttatgacttagaagttaagatagtcgaagtggatggacagcgcttttgttattattttaattaagagaccataggaggagtatatgaaaaaaatagtatttagtttggctgtattggtaatgatcacggggttagcaggatgcggctctcaagaaaaaggagagtcaacaagtgcctcaacggctgcagcggcgcctgccgaaatcgaagtgacagatagtaatggcaaagtgactgtgccattttcaccaaaaaaagtcgttgttttcgataacagtgcacttgatacaatggatgctttaggcgtaggagatcgtgttgtaggagctgctacgagcaatatgcctgactatttaaagagttatgctgcggttgattctgcaggtggtatcaaagaacctgacttagaaaaaatcaatcagatccaacctgatttgatcattatctctggccgccaaagagactttcaaaaagatctggaagcaattgcaccaacgatttttctaagtgtagacaacgaaaacacttggtcatcgatcgataacaacattcaaactattgcccaaatcttcggaaaagaagaggaagccaagaaacagttgactgctctgcaaacaagaatcgcgaatctttctgaaactgcagaagccagcaaggaaaaagcattagttgtcatgatgaatgaaggtagtctttctgcctttggtttgggatcaagatatagcattgtttatgatacatttgggtttacgccagtcgatgatacattagaagcatcgactcatgggcagaatatttcttatgaatatttactggaaaaaaatcccgatattatttttgttattgatcgtacaaaagcaatcggtggggatacaagccagagtacgttgactgaaaatgaattggttcagcaaacaactgctggaaaaaacgggaaagtgatcgaattaaatccgcaagtttggtatttagcaggatctgggatcgaatcattggacattatgttgtctgatgttgaaccggctgttgcaaaagattaaaggcttgttatcggataaggatggcttaaatgagaaacagttgcgaatgttggatgttcgcaactgtttttgtattgaaaacaatttattcaatttaaaccaaatttagtttttttcaggtatgctaggttcaaagggaaggagcggattccgaaatgcacaaatatttgctggcggctgccttaggtttagtactgttaatagggggattatttcttcgggtgaacctgatcccgatcgcagactttgagctattgactttggcagaaaaaattacattacaaacagaggtggggctcgcgccaaagtgggggacagtcttaatgggcagcggattagctattttgttgttggttttcatttcctattattggccctccaaaccggggcacaaaaactatttggtcggtgcgggtttacttgcgctttggataatctgcgtaaagatgatttttttcccgcctcaaaaggaatgggtcgaagggacggtcatgaaagtctatgaggatgggtatgcatgttttcagacgaagaaaaacgcggaatcacgttattcatcagattttggtctgtattatttcgaaagcagcgacagttggcagcttcgagaaggacagcagatcaaagttttaacagaaggtgggagtttcataaaatttgatgaagtgtttttaccggtaattgatgttcaaccgttagcggatgtttctcggtctcaagactgaattaaaaaaagaatcacagatttactttacctgtcgtagtaattgatttataattattacgacaggtaaagtaattttaaggaggggatcgagtgatatccagcgatggaattcggggatacaatgatgcaatcatcttatcgattctttccaaagatgattcctatggatacgacatttcaaaacagatacgtgaaaaaacagattcgctctatatcattaaggaaacaacattgtattctgcattcacacgtttggaaaaacaaggattgatccgctcgtatcctggagaagtgactcatggaaagaaacgcacctattatcaaatcagtgaggcaggaagagaatttttagaagtaaaaaaacaagagtggcagcaaacaaaaattgttgttgagcgctttttacaaggaggagcaaaatgaaaaccatccgggattatttagatagtttgtttttgaatgtacccatcacgccagaaacaaagaaagccaaagaggatttggctgcgatcatggaagaccattaccatgaattgattgaacaaggaaaaagcgagcatgaagcaatcggggctgtgatcagtgaatttggatcaattgatgagttgcttcaagaactgcaagtagcgcagtcagaagatactgcagaagaagcctggttagatgctattacaatcgatgaagcctttgatttttgggggaagattcgccgttttgccttctcactttctttaggtattgcgttatgtatcgcttctcttggaatatttctcttttttgccaatgaaatcgatagtggcttaggactattagtcatgttcatgtttgttgcattgggcgtgggctttattattacctccggcttgaactattctgcatcaaaacgaaaattaaacgatcgtccatttgatcaagaagtaaaacaagaggcgcggaagcaattggaagattatgaaaagagttttcgatttggtctggtgctagggatttttgcatgtattctgtcggtgacaccctttttcttgatggaagctattctttacattcccagtggtttagctttaggactgttttttgcggcagttgcattaggagtattctttatcgtctatgtcagtatcatccgcacaggatttgccaaaatggccgatggcgtttactttatttctaatgaagatgaacccggaccacgggcagcgcaacacatttatggagaatccgcaggaaaagttcgcttttttaatacggtttattggccagtgatccttgtggtttacttcctctggtcattttcaacaggaagctgggcctattcatgggtaatcttcatcttgggtggggtttttcaagatttctttttgcctcatcagaaaaataagcgctaaggaatttcttgaaatagtttttgataaacatctgaaagatccgaggttctgctagagcagaagaggagtccttcaggtgtttttcttatcggtttggacaaataaaaacttttcactttgatgaatttgacaaagtgaaaagtgacttaaagttattgagaaaatatccttgtaaatgagaatgagtagccttgagggaataattgttagaaaagtgaatatatttattttcccagaaatcattttaaaatgaaagtgaaacgctcatttatgaggagaaattcattttgtttaaaaaaatgcaaagagactattgcaattccactggctttagactaataattaagagagattattctcaaataataattctaattggaggaatcgctatgtcattaattggaaaagaaattgagtcatttgaagcacaagcttatcacaacggaaaatttatcgacgtttcatctgaagatttcaaaggaaaatggaatgtggtttgtttttacccagcagatttttcatttgtatgtccaacggaattagaagatctacaaggtcaatatgcagcattgaaagaactaggaactgaagtttattctgtttcgacagatactcactatacccacaaagcatggcatgatcactctgatgcaatcagcaagatcgaatacattatggttgctgacccttctcacacgatctctcgtatttttgatgtactggatgaagaaagtggcctttcgcaacgaggtacttttattatcgatcctgatggcgttgttcaaacggttgaaatcaatgcggatggaattggacgcgatgctagtggattgatcgacaaaattcgtgctgcccaatacgtgcggacacatccaggtgaagtttgcccagctaaatggaaagaaggagaagacaccttaacaccaagtcttgatctagttggaaaaatataggaggttgacatggctttagataatggaattaaagaacaactgaaacagtatctggcaatgctggaatctgaaattgttttcgcagctagtcttggtacagatgacgcctcacaaaaagttcgtgatttcttagaagaaatcgcagaaatgtccgaacgtattacgatcgaagaagtaactgcagatcggacacccagctttacaattatgcaaccaggtatcgacagtggcattgcttttgcaggtcttccactcgggcatgagtttacttcatttattttagctttattgcaagttagtggccgggcgccaaaggtcgaacaagcgattcaagaccgtatcaaacaaatctctcagcctttgcattttgagacatatgttagtctgacgtgccataattgtccggatgtcgtacaggcgttgaatatcatggctgtcttgaatccgaatatcagtcatacgatgatcgaaggtggtatgttcaaagcggaagtagatgccaaaaaaattatggccgtaccaaccgtctttttgaacggggaagaattcgctagcggtcgtcagacgatcgaacaattacttgaacaagctgctggtccgactagcaaagactcgtttgcagataaagatctgtttgacgtgttggtcgtagggggcggtccagcgggtgcaagtgctgctgtctacgctgcccgtaaagggatcaatacaggcatggtggtggaaactttcggtggtcaagtgatggaaacattaggaatcgaaaacatgatcggtacaccttacacagaaggaccaaaattaatgcgtcaagtggaagaacatgtcaatgagtataatgtagatgtcatgaaaggacaacgtgccaaagatatccgcaaaaatgaattcgtggaagtggaattagagaatggtgctgttttgaaaacaaagacagcgatccttgccactggtgcacggtggcggaacattaacgttccgggagagcaagagtttaaaaataaaggggttgcttattgccctcactgcgatggtccgttgtttgctggtaaagaagtggcagttattggtggcggtaattctggtattgaagcagcgattgatttggcaggtatggcaaaacatgtctatgtattggagttcttgccggaattaaaagcagaccttgttttacaaaaacgactagcaacattggaaaacgtgacggtcatcaccaatgctgctaccaaggaaattgcgggttccgatcatgtggagcagctgacttatgtggatcggcagacaaatcgtgaagccactttagctgtggaaggcgtctttattttgattggcttgatgccgaatacagaatggctgaaagatcgagtggctttgaatgaacgcaatgaaatcattgtcgacaaacatggaactacagatcttgctggagtttttgctgccggagattgtacagacagtgcctacaagcaaattattatttcgatgggttcaggagcaacagcagcgttaggcgcatttgattatttgattcgccaataatcaaatgcggactgatcctttaaataggtacaaggaatgactgcaacgccgtttaccaatttgattcatttttgatccatgatcattgcagctgatggctgaacttcagtcaaatagttgccagttgattgggtctcgatggatcgatggcaaatggctgttgcagtttttttgtcctgaaaataacgagaaatctctaactaaaaaaggcagcgattcaatgagctgtgagaaaacaggggaattagtcaattgcttaaagatgtttaagaataattaaagaaaaacacaaaattgcggaattcagttgtcatcatgaggaacaaaaggtaacattcaggatgaataaaaataacggataaccttgttaggtgaggctcctatacaaacataagctattgcgcagaaacgtcgaaagacgccaatgtgtaaaacaggaattgtcggattaaggctcttcataaaatagctaagaagaaataaatactactaatttgcttcttctttacgttgtatagtgccaaaactcggacgatgagattgtttgcgaagtcgaacgtcttgagagaagtttggctttttttcttctcttgagtatgtttcaaaacgtaaatggataaaataaataacgtctgaaatcacctgctccaagggaaggagtggacgatatgagtaaaaagagaaagatcgattggttacttatcacagcttatttgctgttgagtatcatcggtcttttaatgatttatagtgcaagttcttaccggttgatgactgctgggggtgcaccggccgcgttgttccagcgacaactgatttttctgctgttgagttggggaatgattcttttgattcaaaaaacccgagtcgaaattttgttaagcaaaaagttagctgtgggactattggcctttggcattgtcatgttactgttggcctacctgccatttttcggggtatcagttaacggtgctcagcgctggatttcgatttttggcattcagtttcagccttcagaaataacaaatgtcggtatgattctttatttggcaaactattttaaggacaaacgatctttcaatgaattaaaaaagccgctctttctcttatttctatgttgtgggctggttctaatgcagcctaaagttgcaggagtaatgattttactatttttggcttttgttatgatcacgactgttcaagtgccagtcaaagtcacattcctgctatttactgcactgatttccagtttatttcttttaggaggtgcggtcctctttttaggacaacacggctggttaccacaattcttcatgcatgtatacaaccggatccaacttgttggagatccattttctgacccatatggtcaaggtttccaaatgattcattcctattatgcattattcaatggcggattaagcgggttgggtttaggcaatagcatcacgaaaaaagggttcttacccgttgcggagacagacttcattttttcggtattggtagaggagcttggccttttggtagggatttttgtaattggattattatttctaattgtgttgcgcctgtttattcgttcggcaacagctattgattcacaaataggcttgattctattaggaactgccacattgttgttattgcaaacaagtatcaacatcgcaagtatcttagggttaatgcctatgacaggggttcctttaccatttattagttatggtggctccagttactttattctttcgtttgcttttggtatttgcctcaaattggaaagagggagggaagcaaatgaagtacttcaaacgacatgaagtgaattatgcactgattctaccggttttcttactttttttattgagtattgcggttcaatatggtgccagtgtgctggatggcattgatccgggaccggttgttgtgcggcaactctttttttgcatcattgccgcaatcgcattgtttgcgggcagtttactttcgacgacttttttattgcggttctctggcatcttttatgttctttctctaggattgatgacattattgtactggttttatgatcccgtcatgtttgagttgacccatacaaaacgttggatccgaatcggccgtttcacattgcagccttctgagattatgaaattggcttttgtattgtttatggtgtatctcacactcttatatgaaaaaagacagattcagcgaacaatcaaatctgactgtttctacattctaaaaatagtactttatagtttgccgacttttctattgatgtatatgcaacgggactttggtactagtttggttttcatcgtaatgctcggcgcactatttgttatttccggtgtccattggaaactgttgacagtaatttttacggtattggctgtggttggcggactgttattgctattagtctttactgattgggggaatacgatgttgtttcgattgcattttaaaccctatcaattggatcgagtcaaagcttgggcagatccttttgcttatcaagactcgattgcttaccaacaagtacaaagtatgtgggcaattggttcaggtggtctcctcggggcaagtgacacgcacattcctgtctacgttcctgtgcgtgaatccgatatgatctttacagtcatcggagaatcatttggatttttaggcagttcattagtaatttttctctatttttatttgatttatcagatcatttttgcagcattgcggacaaataataaagcctcggtctatctatcgatcacgtttgtttttggtttggtttttcaaatttttgaaaatatcggggcggcgattggattactgcctttgacgggtattccactaccatttctgagtcaaggtgggacctcgctgattgcagttggtctctctttaggcattatttttgggctggagaaggcgtatgccccgaaaaaaactttcccaataagttaaaggagtttactaaaatgttcaatcgaactcatcggatgacggtcagtcttagctttattgcattgttttttttattgacgatcctagtcttgcatcagccacactggtttcaaaggatagaccgactcttttggaatttgcctcagatgcgcactgctttaggagaccaaatcatgttgggcatcgcttcgactgctacgatcctaccaataactggtttatttctgcttttgggcatctatttatggaaaaagcagcaacgagtttgggcaatctggggaataggaaatctgattgtagtgagtggtatcggtcaagtgatgaaatggctgattcagcggccacgcccagtcctagaagctgggatggttcgcgattcacacagctttcccagtggccataccctgctagctgttacactggtgactacctgtttgcttttcactcgatttttgtttaagaaaaaaggtctgttggttatcctcggcggctctttcatttttttagtaatattttcccgcttttatttaggcgttcattacccaagcgataccctcgcaagtatctgtttagcaagtgggatcacattgatgacttatgaatggactgaaaggattcttacgagtaaaagtaacaatttatccgataaattcaagcaaaggagaagaccatgacgaatggaaagaaagtttggctgacgcttttggttagtttaacactgcttgtgaccgttggaacagtctatgcgctgcgcatcgttcttcgtgcagaacaaacggttcaaaccatgcacgcaccgattaaagggcgagaagcaacagtaattgaagaggtagaacccctaagtctgctccttttgggtatcgcaaatgattcaaagcgaaaaacagactatcgtgcgaacacgatcatgatcgtgacattgaatccaaaaaataagcggacatccattacaagtattcctcgtgatgcttatgtagagattgttggtaaaggtttcaaagataaaatcaatcatgcccactcatttgggggcgccgaaatgatgatcgcttcgatcgaacaatttttacagatcccaattcatcattatttctcgatcaatatggatggcatggtagatcttgtagatgcgattggcggaataacagtttacaacgattttgagtttacggctgagaaaattcattacccagagggggagcttcaattagatggttgggcagcacttcagtatactcggatgcgtaaagatgatccagaaggggattatggccggcagagacgacaacgacaagtgactgagctcctcgctaaagaattgctgtctctgtcaagtttgttccagtaccaagagctcatgtcgatcgttggagaaaacggccaaacggatctcacttttcagcagatctcacgattaataacgagttaccagtctaccctaacaacagttgatctctatcaaatacaggggacaggctttacgggagatggattgcaaggagaagcagggatttcttaccaagcaatctctgatgaggaacgacagctagtgatccagcgattacattctgaattggatatgcaaacacataatgaaccggcagaatagatgatgttgacaattcgatcatagatatactaaaataaagaaaatcgttcaaaaaaagaaagaggtctcttgatgagtgtcttaggtatctaaccagcaaatttaaacaaataaacaatactaagtttatttgttgtgcctgcagataccgatcaaaatcgttattgataaaaacaggtgatggggaactgtcaccttttttgtacactttttttgaacgtggaggagagacgtttcacgggcacaagaaaggacctcatatgaatatcccacaagaaactgaatttgacacaattaaaacaactgttagtcaacgaatccttagtgattatggcaagcaacgatttgccgaacaacaaccggcctcttctattcattccgctagaaaaagactagcggagacaaaagaagcaatggccctcttaggctctgggcaacaagtaccattcatgggcctgtctgatattttgcatcatacgacaaaaatcgaaaaaggcttgattttagagccgagagaattgatcgattatggagactttttacggtcttttcgattgatccgtcagatgtttgaaaaaaaccagtggcagacaccgcggcttactggctatgcgcaaggattaacggatttttcagacaccgcacaaacaatttttgacaaaatccgaaatggccggattgacaccgatgccagtcgtgaacttaggaaaatccggggacaaatagccaagcatgaagcagaattgaaaaaagtcttttcaaagtttttgcaagatccacgactattacaagatgcacgaatcattcaaaaaaatgatcgctacacactacctgtgcgctccgaatttcaacatcagatcaaagggcagattattgaacgctccaataaacgggcaacagttttcattgaaccagaagcagcgattcgcttgaacgatcgcttgataatggccaaagcagaggagactgccgaggagtatcaaattttagctggattgactggactgcttgcagaaaacttaacagaaatttttacctgtctggatgtattggttgaattggacatcatctttgctcgagcaaaatactgtcgtgaaattcatggtgttccgctagaaatcaatgaagcagaagtaatcgacttacaggaagttcgacacccattgttaggagcagcagcagttcctctgtcattacaacttggttacgatgctcgctgtctggtgatcacaggtcccaatgccggtgggaagacggtggtgttaaaaactgtggcactggtttgtgtgatggcgcactatggtctctttccttcacatgctgggggaagtcaggttccatttttgaaaaatctgtggatggatattggggatcaacaaagtttagcgaacgcattaagtaccttctcgggacatatgaacaacattgcccaaatcgtcaagcatgcttcacggcaaagcattgtattgctggatgagatcggcagcggaacagagccaaatgaaggagctgctttagcgattgcgatcatggaagccatctatcattcaggtgcgcttttgatcgctactacccactatggggaaatcaaacagtttgctattgatcatcaagatttccatacggctgcaatggcttttgatccagaaacattgacacctaaatatcggctgctttctgatgctgtgggtaccagtaatgccttttggatcgcagaaaagatgtcagtctctaaagaaatcgttgctaaagcacaacgatacttagaaacgaaacagtatccaacggaaaaagcagtatttaaaggcatccagaaagaacgacagcaagtatccgtggctactttaaaaaaaggcgatcgcatctcttacacagagacaaatcaaacgggcttgttttatgcttatttagaaagcaatcaagcacagattttgctggatgaatcattggttatcgttcccactagaagagtcaagcttctgatgtctagagaagaattatatccagcagggtatgacttggagagtctgttccattcatttgcagaacggaaatttaaccgagatatcgaccgtggatcgaagaaagcgcaaaagaaattaagaaaacaagcacaggaaaggcaagcatttgcgaaaggcgacggcgcgcaaccgtaattgatcgcaggaaataagctagcaaagataactttcagtaaaaatcaagatattttgcaacaatacacaagtgtttccaataatggtagaaatagcgctagaattgcaataaatatataggatgctcacagcaaaggtccgaaagaggggaaagagatgatagaaacaacgcgtttaattttaagacattggcagaattctgatgccaaagagttgtttgagttggcaaaagatcctgctatcggcccaagagccggctggtcgccgcatcaatctgtggcagaaagcgaaacaattattacggatgtttttaacacgaatgaaacgacttatgctatttgtctgaaagatggcacgccgattggcagtattggtattatgccaatcagcaaagaatttatgctcccgcctgcagttgaagtaggctactggatcgggaaagcttactggggacaaggctatacagtggaggcattgactgcgatccttgctgatcagtttgccagggaaccgaagctaacggtttgggcaggctattatgatggtaatgaacaatcttggcgcgtccaacagaaatgcggttttgtctatcagttaactcaaacagtcgaggttcctctgttaaatgaacaaagaaaagaacactttactagcctcacgtataaccaatggctagctgtctcagagaacggccaaggaacagcaattcaaaagaaagaaaacaattcatcaacgattcactatagcaaacactttccagaggacccacaacaagtcctttcgttgtatcaagatgctggctggtccttgtatattcgcgaaccagaagtcttgtgggcagcacttcagcaatcccacgtgatcactgcttggcagcaagagcgcttagttggtttggtgcgaggaataacggatcagcaaacgattttgtatatccaagatttactcgtattgaaagaattccagcggcagggaatcggtcaaacgttactaaaaaaaatagtaggagactacccgaaaattcgtcaaaaaattttattaactgacgatacgaaaaaaacgcgggctttctacgaagcttgcgggttccaaacagtggagaaaagtcatgcggtcgcctttttatatgccgctaacaaagttagtgaaggtctatcttcctaacaaataataggaaaagaagtaggaaagtaaacagggaagtaagttggtaaataagtaagaaaagaagtaggaaaaactagtggcataagtcttaaccaagaagacacactcgatcactaaagaagccgtcctctggatgtcgtcttataatggctgatcttgactgttgtgatcgaaggtttatcagactgatgccactagtttttttgatcgtagcaaggacttgtctatagcaaacctcttgtttcatttttctagcgggaacttagaaaacgtcaaatttaataacattaatgaaataattttattgaaattttgtttttgtgacaaaaaaatcggttaagacatagtgaatatgctaaactagtaatgattgtttaacaaaaaaacaggaggtttttctttggagctattaaaaaagtcgaaattatttgcagtacttgtgtttatttgtttggtgggactaggcatatggatctattcaaatattctgtttgtcttccgcccactagaagccatttttgctagtgtctttttacccgttttgatttctgtatttattttttatatctttttgccttttttcaatttgatcaaaaaaaggagcagcaatcaacatctcgctctttatgtcacattgcttctgatcctctttgctgcttatttaatcattcaggtgatcggtccggcactgattaacgaaatggcacgttttatcaatcagattccttacatcatcaacagaatcattgacaatatcgatcattcttcttttgaggaattatttggtccactgttagattcattggatatcaaccaaatcagtaatctcgctgctcagtttatcactggggctacgaatagtctgacaagtttggtagcaatcgtctctcattcagcgattgttttgttcacgattccgttgctattggtttatatgtttaaagatggacataaggttcctgatcttttggtctcgaaagcaccaaaaaaatttcgctctcttattctacagttgtgtcaagattttcatcaagctgcttcagcatatattagcggaaagctacttgtctgtttgtatgttggcgtcttcagctatctaatctttacatttttaggcttgcaaaatgccttgttactaggcttaatctgtggtgttctagatatcattccgtattttggtccttttatcggcgcggcaccagcattcttgtttgctctgagtcaagatatgaaaacagcagtcttgttagttattggcattacgatcattcaatttggcgagtcgtatgttgtttcaccaatcgtcatgaataaagtgctgcatatccatcctatcattgccgtcttcttattattgatcgccgggaatttattaggatttgtaggaatgatcgttgcgctgccggtctattcgatcgtgatggccatggcaggaacgttgacccgctattatcaacagcaaaaacatgtaaagcaagaaggaaaagaaaatgaaaatcgttgaatatgcaggggacaaagaagattttgtactagcaaaaataatacggacctcttttgatgcagataccgcatgccatttgggggcagacaaacgagacggtccatctggctatcataatggagaattattgaaacgagtgaagcaagatccagatctcagtctttacctgctgcaagaaaatggcattattggtttgattgtggcaaatccttgtaaacaccagatttgctacttttgtctcgaccctgattttattggtaaaggggttgggactcttgcttggcaattatttgaaaaacgatttcccgtcgattactggatactagaaacaccagcatattcccttagaaaccagcgcttttacgaaaaaaatggctttaaaaaaattggtgaaaaatggtatagtaaagacctatcctatatctaccaaaaaaaattttgataaaatcgcaaagtgagggaaggctatcatgaaagtcttatggaatgaagagatcgttgatcgacaagaggttcaaatcgatatcgaagaccgcggctaccagtatggagacggaatctacgaagttattcgcatttatcaaggaaaaatgttcatggccgaagagcacttgcagcgactagagaacagtgccgctaaaataaaaatgacattgccttatgaaaccaccattctcaaagacagattacgttcattgatcgacattgagggaatcactgacggagaagtgtatttgcaagtgacaagaggggttttaagtccgcgaaatcatgtttttcctcctcaagggacgataaaaagtgtccttactgcaaatgttattccattccatcgtccagtggacatgcagcgtaatggtcttcaagccacattaatccctgaccagcgttggcttcattgtgacatcaaatcattaagccttttggggaatctgctctctttagaggaggctcggtccaatggttatgatgaagcactactgcatcgagagggcttttttacggaagcctccgcttcaaatttatggtttgtttccaaaggaacggtgtatacgcatccggatggcaatctggttttacctgggatcacaaaaatgaaagttttaagcttgtgtcaggaattgaaactaccaattaaggaagaagccgttgcgattgatcgattagcagaatttgatgagtgttttattaccaattctgtctgggaaatcgtgccaattgttcgtatcgatggtcatccggtgggaactggacagcaaggggctgtgactgctaaactacaacaagcgtatattgaagcaaccaaaaagaactgactccaaacaatacacccacctgagatagaaatcccccaaagagttagctgactagcgatctctttgggggatttcaccatttagtagatgttagttgaaataggaatcagagacgtgctagcagaacacttagatttttcaagtttctgtttcattcagccacgtcgtttactgggcttagcaatcaattgttgggcgtttcatgttgtcaaaaatggtcttaccagtcttggggattccataatttactgtccaactcgccttgcttcagttgaattcgtgtttgttgttgtgtcaaaagcgcttctaattcttgcaagaaggctttctcatgataattgagtgtctccgcggtttgttcttcaatcaaggagtggatccatgcctcattcattcgtaagcctccatttcagcaagagcttcatctaattcaagtaaggtttcctgattttggataagttgatcgagaagaggagcgagttttggattttcagctgtcaatgcttctagtctttgaataaaccactgttgtttggcagcaaatgaaaagggggcttccattgtcagcagctgctggtagtcgatcacaaatcgccgtttctctttttctgttttatacatcaactgatcgagaacgagaaccggtaagatggtcatttggtatttttgtgccattaaagttagaggtcgcaaaatttcagaaaaactggctccttcttttccacctagttgaaattctttggctgcaacgcctgtagaaagcgcaaagccgatttctttatttaataagtagggtttggctgcctcccaaaccgtatcgatccaacatttcatttttgcaggaacttggtaccaataaagggggaactggaaaatcagacgatcgatcgtttgcaatcgttctaactcaatctctaaatcaaaatcccccgcaactttgtcaagcatatgaacactgacattaggcatcttggcactttcgctaaaaaaacgttgagataaagagtcgtcataggacggatgactggcaataactaatgttctaatcataaagaaaatcaatcctttccctatagatgtaacataattctggcaaaaacggaactactctgcttttaaattagaaggataaatgtgagagaggctaaagtcattattggttcagtgaaatctttactgacttgaatcgtccgtctttttttgctatactgtttagtgaattgaatagaagacagacaaaggttgagcatttcgatgcttcaaggatcacgttctccaaggggtgaggagaacattcttgaaggcgtgccgatcttttttttgaaggcatacttctttacgaggtatgccttttttgtgtctatttttcaattgtcttgtttactttgacaataggagggatattttgatggaagaggcactgaaacgcctgcaagaggcagaagcctataatcaacagcagatgcagcaattgcaacgagcgctgtctgattacgaagaagagaagcaggaggaactacaacagcgtgtacttgaattgagagcagcatgtctgcgtgaacagtccgcacttgaacaacaattacaacaaacgttgcaaaaaacgacggaacagatcgaagcagagaaacaacagtttattgcagatctccaagaaaatgttcgtcgctgtcaagaacaagtggtcgatcagatcgttgaaggagtgatccaaacttatggcagtcacgaaactaagtaagctgaccttgatcgcccccgaaaaccatcaagagcggttattgaaaaaactgcaaagcttacagatggttgaaattgaagatgtctttgaaaatgcagaaaatcaaccatggctcaaagaattttttgctgattatcaacaagagacagcgactagctacgcagagacgcttcgcaggatccaagaagcaatcttgttcattcggcgacaaggcggaagcggcaaaatacgagagtggcaacgccaatctttacaactgcctgcatttgaagactcctttcaagagcaaactgtcttgacgcttgtcgaacaaattgaagagttgcagttgcaatggcaaaaaaatcatgaagcgatgcaagccgcttctcaatcagaaacctggggaatggaatggcaaaacctggatgtttctctcgaagaaaaagagttggcatttgccactttcttttgtggcagtgttgaaagttctcattgggaagccatatcagcgaccctcaaacaacttgatgctgtttacctggaaatgatttattcggatacaaaaaagacaaatttcagttgtctttacccgaagaagctttctgcagaagttgagaatgtttttcagcgatatagtgtaaaaaaagaaaatacggacagtctgaaaaaaccaaaagtgctgttgcacgaggcccaggcaaaactgcgagagctagcggatcagcgaaaacagctggcaaatcagattggcacgtataaaactaagattgcttgtttgcagcaagcagaagaatattttttgacaaaagaacaacgaaaaatggtacgaaaacgattggtcactggcaaacatcatactgttttgagaggctgggtcgcgcaacaagatcaacagactcttgaaaaagagctggcagattcttttaacggcgaagtctattgctcattcaatgaacctaccttagaagaattgactgcgaatcaagttccagtcaaattgcaaaacgcttcgtttatcaaaccatttgaaatgttgacggaaatgtatagtttgcctaaatatgatgagatcgacccaacgccttggatgacacctttttattatgtcttctttgggatgatggttgctgatttgggctatggcggattgatggcactggtgaccactatcggcctgcactttttccgtttacctaaagggacgaaacggtttatgaagctgtttcaaacattatccgttcctacgatgatttggggattgatctatggctcgtttttcggagcgactttgccatttcatttgttatcgccagcgaaagactttatggctatttttggattatccatgatttttggaggaatccaattgtttacaggtctttatttggccgcgaaggaaaatattcgcaagaaagattttttagcagctgtcaatcaaggcttttcttggcaaggcttgctggcgggacttttggttgctgctgccggaaattggctctttaccgccccagcactcgtcacattaggattgattatagcaggacttagcgggctgctgatcgtgattgtgccgatcattaaaggaaagtccaaagttggcggttttttcatggggatctatgatctctatggggtaacaagctatattggcgattttgtcagctatagtcgtttgatggcgttagggatctctggcggcagtatcgccgctgcctttaatttattagtgggctatatgccgccggtagcacgattttctgttgggatcatcctgttagtgatcttacaggcgctaaatatctttttgtcattactaagtgcttacgtgcatgcagcgcgtttacaatatgtagaattttttggcaaattctttacaggtggcggccgggcgttcgacacctttaagccgagtgaaaaatatgtcgattttgaaaaagaaaatggaggaaagaaagatgattgattacttgattaataacaacggtggaatggtatttgcgattataggaatgggaatcgcaacgattttttctggaattggttcagcaaagggtgttggaatgacaggggaagcagctgcggcgttgacaacgaatcaacctgagaaatttgggcaggcactgattctacagttactgccaggaacccaaggtttgtatggttttgtgattgcctttatgatctacggcagtttggcagcagagatgtcgacggtgaccggaatggcctatttgatggcttcattgccggtagcttttaccggattgttctctgggatcgcacaaggaagagtggccgcatcagggattcaaattttagctaaaaaaccggaacactttttcaaaggagttatgttctcagtcatggtggaaatgtacgcgatcttaggcttcgttatttctttcctactgttagggtccatttaaaggaggcgacaagcaatggaggcaatggatgccatcgacaaaatgattgctgaactagatcgggaagcaaaagaaaaacggcaagcaatcgaaacggacactaaaacaaggatcgatgccgatttttcagctgcctggtcccaaaaagaactagaaatcaagcgccattcagcagaagcaaaaaaacaaatcgaaaaaaactatcagcaagacatgaatcggcgaatgaaagcagccaaacaagaagggattaaacaagctcataaagaactggagacattattcgcggcagcttatcaaaaaatgaatggattggcgcctgatacagtccaacatctggcggaaaatacattaatgcaattacccgtttcgggagaagtaatctttcgttgtggacagcaacagtcagcaagtttgacaaaagattggttgactgctgtcaatcaaaggttgccttatcttgcaaggatgggcaaaccattggagcaagcagggtttatagtagaagacaatggcgttttctacaatttcacctaccaagctttactagaagaatacaaaaatgaaacgagagaacattggctgaaagtgatccaaaaaggagggtaagctatggcgagctatcatcaattgaatccactgattcggatcaaagagacaaccttgcttcaaatgcaagattggcagcagctgattgcagcagagtctatggatcaagtaatggcaatcttgcagcaaacgaattatcaacgttatctaggcgctgatttttccgaaaaatttgaggggtatctggatcaagaaatgctgacaaccatacaagaattagcagaaaacgttccagatcctgatgtgcttcgtttgatcatgctgccgtatacctttcataatttgaaggtattgaccaaagaagatgtaacagggagagattatagcaatttactgatcgaagatggattctatacgatcgatgaactaagaaatgccatccaaacaggatcttcggaaagtataccgtctaaagtcattgaaacgatccaagcggtaagggaatacttagaaggttctgctgttttgcaagggatcgatattatttacgatcgccgctttttacatgagcaacgacgcctagccgaaaaaataaatattccagcactgacacatgcggtgatcacaggaatcgaccttacgaatatcacgattgctgcacgttgtttgctgcaaaaaagatcaaaaagttttatggcggctgttttagtcagtgtgggaagtattcccaaagaagattatctcgcttttgcggaaacctccttcactgactatctcgcctttttgaaacaaactggctatcaagaagcgctactgccgctattacaagagaccacgatcgattttgctgcattggcactggtgaaagatgacttagttactcagcagttcgtagctgctgaagcgttgggaccaatgccattactcgcgtttttaaatgccaaaacattggagattcagaacttgcggctgattttggtaggaaagcgcagtggcttcacagaagaagagctgagagagaggatgaggtactatggcagctaagattggtgtgatcggcagcaaagaatccgtgttaccttttcagctgtttggctttcaagtgtgttacgcaaccgcaaaagcggaagtgactcgtgcctttcagtgcttagtgaaagaagagtatgcggtgatttacgtaacagaaaaatgtgcggcattgattccagaagaaattgccaaataccaacagcaagtttcaccagcgatcatcttgatcccagattacgatggatcccaaggggtagggctgaaaatgatccaggaaaatgtcgaaaaagccgttgggcaaaacatactatagaatggagctgatgttgtggaaacaggaacaataattaaagtgtcaggtccgttagttttagcaaaagatatgggccatgcaagtttagaagatatttgtcatgtcggtgatctgggggttgttggagaaatcatcgagatgagaggaacgatcgcttcgatccaagtttatgaagaaacgtcaggtatcggaccaggagaacccgtccgaacaacaggagaaccgctgtctgttgagttagcaccgggaattatgtctcaaatgttcgacgggattcaacggccattagaaacatttatggagctgacccaaagtaactttttgaaacgaggggtccagctgcctgcattggatcatgagaaaaaatggacctttgaaccgaccattgcggtgggaacggaagttactgcaggaatggttatcggggtcgtccaagagacgccattgctcctccacaaaattatggtgcctaatggcgttacaggacgggtcaaagaagtttttgctggtgattttacgattgatgaaacggtttatattcttgagacaccaaaaggagaacgctccttttcgatgttgcaaaagtggcccgtacggcacagtcgtccagtcaaacagaaattaaatccggtagagccaatgatcactgggcagcgagtgatcgacactttctttccaatcgcaaaagggggagcctctgcggtccctggccccttcggtgcgggaaaaacagtggtccaacatcaaattgctaaatgggcagatgtggacttagtggtctatgtaggctgcggagaacggggcaatgaaatgacggatgtcatgaatgaatttccggaactgattgatccacgaagtggcgaatccttgatggctcgtactgtactgatcgcgaacacttccaatatgccggttgccgctcgggaagcttctatctataccggaatcacgattgcggagtatttcagagacatggggtattctgtagcgattatggccgattccacatctcgttgggcggaagcgttgcgagaaatgtccggtcgcttggaagagatgccaggtgatgaaggctatcctgcctatttgggcagtcgcttagccgagtattacgaacgatccggtaaagtgatttgtttaggctcggaacaagaagggagcatcactgccattagtgcagtatctccatctggaggggacatctccgaacctgtcacgcaaaacaccctgcgagtggtgaaagttttctgggggctggatgccacgttagctcaaaaaaggcactttccctctatcgattggctaaaaagctattccctgtatgagaatgaaatgggcgcttatctggatcgtcagttgcaagtggagtggtcgaaaaatgtgactacggctatgcggatgctgcaaaaagaagctgaactttctgaaattgtgcgtctagttgggattgatgccttatcggataaagatcaactactgttagagatcacgaagtcattgcgagaagattttttacaacaaaatgcctttgatgctgttgatactttcacttctcgagaaaaacaatttgaaatgctgcagaccattttactgtttcatgacgaaggtcaaaaagctttagaattaggcgcctatttgacagaaatctatcagggaacagaacgtctgcgagataaaatcgctcgcatgaaatatcttccggaagatgatttagaaggaatccgcaaattggaaagcgagataaaagatacgatgaaagaaatcttgcagaaaggagatcgtacggatgatcaaagaatataaaacgatcggggaagttgtcggtcctttgatggcggtcgatcgtgtctcaggagtgaaatatgaagagctgatcgaagtacgtctgcaaaatggtgaaattcgtcaaggtcaagtcttagaaattcaagaagataaagcactggtgcaaatctttgaaggtactggcggaatcaatttacgagaatccagtgtgcgcttcctcggacatccgttagagctaggtgtttctgaagaaatgattggccgggtttttgatgggttaggacgagtcaaagatggtggttcagaaatcattgctgagaaacgaatggacatcaatggggaagtaatcaacccgatggctcgagattacccagatgaatttattcaaactggcatctcttctatcgatcacttgaatacgcttgttcgcggtcaaaaattaccgattttttctggttctggtctgccgcataaagaattagcttctcaaatcgctcgtcaagcgcaagtgctcgacacagaggacgactttgcggttgtttttgcaggtatcgggattacgtttgaagaagcagaatatttcatggaagattttcgccaaaccggagcgattgatcggtctgttgtctttatgaatttggcaaatgatccggcaattgagcgaattgctacgccgcgaatggctctcacagctgccgaatatttagcttatgaaaaagggatgcatgtcttagttatcatgacggatatgaccaactactgtgaagcgttgcgggaaatatcagctgcccgtcgtgaggtacctgggcgccgaggctatcctggttacctctatacgaatctttccacattatacgagcgagctggccgcttacggggagtgaaagggtcggtgacccaaatccctatattgacgatgccagaagatgacaagacccatcctattcctgacttgactggttatatcacagaaggtcaaatcattctttcaagagagttatacaaaaacggcatccagccgccgattgatgtcttgccttctctttctcggctgaaggacaagggaacaggtgaaggcaaaactcgtaaagatcatgcatcaacgatgaatcaactcttctctgcttatgcgcaagggaagcaagccaaagaactcgcagtcgttttaggggagtcagcactatctgatgtcgataaaatctatgccaagtttgcggaacgctttgagaatgaatacctggatcaaggttatcaaacaaatcggtccattgaagaaacgttggatcttgggtgggaactgttggcgatgctgccgaaagtagaattgaaacggatcagcgatgcgttactagaggcgtttttaccacaaggagaggatgcagatgagcagacaaaccgttaatccaactcgcatggaactaagccgcctcagcaaacagttgacgactgccaaaagaggtcataaactgttaaaagacaaacaagatgagttgatgcgtcagttcatcgaactgatcaaacaaaacaaccttttgcgtaaagaagtagaaacacaattacatcgtgccatgaaggcttttcgcctagccaatgccacgatcaatgaaaagtacattgaagaaatgttcatcttgccagcaacagaagtttctcttgatgtctcaaccaagaatatcatgagtgtggaagtgcctgtgatgcaattcgactatgatgatgtggtgatgcaggcaccgatcgagtatgggtttgtgaactcgaatgttcctttggatctggcaatgggacgtttcaccgatgtcttgcctaaactattgtctttgacagagatcgaaaagacctgtcaattgttggcggatgagatagaacgaacacgccgccgggtcaatgcgctagaatatttgacgataccagaattggaagagacgatctatgggatcaaaatgcgtcttgaggaaaatgaacgcgccaatgttactcggatgatcaaggtaaaaaataaaacaaagtgaatgccgcgtcagtcgaaaatctgcttggcacaaaggtaggaaagaaagatgaaaaaaagaatgtccaaaaaaatcagtgcaccgcagctggttacactggtctttatgatgttgatcttgatgggaactgggttgcttatgttaccagttgtaacaaatgatgggcaaggtgtgcctttcttagatgcattgtttaccgcaacttccgcgatttgtgtgacaggactttcgactttttccatttctgaacagtataatatgggcggacaagcgattcttttgatcttgatcgaaattggggggatcggttttatgtcgatcccagttttcttttatatcttagcaaaaaaaagggtcaatttaagcactcggatgattctaagagaatccctcaatcttgaccgaatgtctggcgaatttcaattggcttggtacattatccgcatcgcatttttgattcaatttttagggatctgcctgttggctctgtcttttgtgccacgctttggttggcagcaaggcctatggtttagtatttttcacgccatttcttccttttgtaatgctggatttgatctttttgggaatagtctggtctcttttcagtcggatccttttgttttaggggtcattagtcttttgatcattgccggcggcttaggctttctggtctggtttgacttgttagctacttcaaaaagacgctcgttgcacagccgtattgccttgttggcaatgattgttttgctgattttagggacggttggtttttatgtgaccgaatatcactccagtatcgtatcaggcgattccattgttagtcgctttttccagttattttttcttgctgtgacccctcgaacggctggattttatagtatcgattatggccagatgagtcaggctgggttaatgttgacgatgattctcatgtatatcggcggtacttctggatcgactgccggagggctgaaaaccacgacggtctcagtgttgatcattaagattcgtagtttgttgaaagggcgcaaacgagctgaagtttttggcagaacgatcaaagaggcggctgtttcgcgggcgttcacgctctttttcttaacactgagtctttgctttattgccatcttcttattatccatcacagaatcgatgccggggaatcctcagtttggactggaatacattgcttttgaagttttttcggcttttggaacagttggattaacaatgggattgactccgtatctttctgtatttggtaaattattgatcatcttattgatgtttattggtcgtgtaggcatcatgacggttgctttttcattgatgacaaaagccaaccgccgagaagccggatacaaattcccggatgaaacggtcatgattggctaagatctgttattaatagttgttttggatcaatggaaatcatccccgaaaaatatggccgacttttaggttagtttaaggtttctcgtctaagatcttcctaagaactaaatgagtcagttgcagcatttcgttagagctgctaggacaatccaaaggtgggaagaccatgagcttgtgggaattgtggtttgtaggaaaaacttttgtgaccgtgttgctagtcgtttttttactagaatggctgtacttgttacggaaactttcaagaaaatcgcagcagttgatctatttactgctgattttggttgaatggctcagcaacggctggatcgggctcctaacaagtttagtatgcggaacgtattttttcgggcattggaaagagcatgctgatacgactgcatcgattcaatcgacagtgtatggtgatgggcaagagggtactgaaaacttgatgcaaaaatactagcatggcttgggtcaatgggaactattgccgctgatctgcttcttcatagaaaagacactgctagttaaaaagaacctgtggtaaacgaaaagataacttttcgcagcacgggttctttttgataggattcagtgagtgatttacgccgttttgcttactacgtggaaatagccttctttgtcttgaatgatccagacattttgattgtcattcttgacgatgacgattccttgtacgacctcattggtgactgtgcgaaattcttctttattcatttcgatacctccaaggtagattccaattattttcagaagggggcagcacgacagtagagaaaaagccgtgctgcaaagcaaaaagaaaattaattggtagctatagtatacaggcaagatattgagttctagtcaatttcatgtaaataatcggttaaaggagaatcaatctgtcaaagaaaaacgcagtttcattttggtattgcctctttccaccatttctcctagtaattgagtggcatgtgataagtaaagccgggccatttcacggttggcttcttccaataactgatttgttaatgggattgtctgatcgatcttctgttgaatcgctaaacaatttgccatgattgtttgttcaaaccgttctgctagatcgctgtatagatcatagtcttgatccccgatcagtgctaatgttttagtcaaccaatagctatttcccggatcgtaagtagtggtggtatcacaataacctttcggggtctcattcacattgctgtaaaaagggaccactccattgaaggtattgggaccaaaagctagccagtgaacgcctgcaatttcatcaggtacgtgactgcgcacttggagaatatgcacttgctgattgcgattgagagcaatcgaacgaaagcgagttctctcactagccgttccattcccgtacggatcataaggggtattttgaaaatgactgctcaacgcccactttacatccatcacgctgattttctttttcggaagacaaatgaaaggtagatcttggtcaagcggatccgacgcggtttcgctgaactgtttttggatataccaagctctagggttgttataacgagtatctttttctgttgcactgccgaaaatatgacgtaaattgattccttcaaagtctggatttaagtgattgctgacaatcatatcaggtaaatcgtcggaaaataaagtatcttgcgaatcaaaatcgaaggtagcgatattcattcgattcggggcgatcacataagcatcatcaggaattcggatcgctgcccaatgatgtccgccaatcgtttccatataccagatttcttctcgatcggcaaaagccaaaccattagactcataggtaccataagtttctagtaactcgcctaagcgtaagactccttctcgagcagaacggatatagggaagcacgatactgacaaaatctgcttctccaatgccttctgttaccaaaggatcgatagctaaaactctcgcattggtagtgatcgtttctgtggcggtcatggcgacattggcgctgttgattcctgaagcagcccagactccttgagattcatctgcctcaggcgtagaagtataccttaggggatctttcggtaaaggaatactgcacccgcttaaaacagcatggaacgtagcaggctgttgttcaggttggattacgacaaatttttgtggtagagacactgccccggcatcttcattgcgagcaatgagggtcgagccatcgagtgatgcgtttttgcctaccagcatggttgtacaagaagctgatttgcgtgtcattgacaaaactccgatcttcagattattttgttgataattgaacatagtatagcgagtaaaagacaaattgacaatcaactttcgactaaaatttagttcgctttctgtgtgacttttagtaaaataggaaagaaggagtgaagaaaatgaaacgaatcgttatttttagtttgctgtggctggcagggattggattgagcggctgttctgaagctactacccagacaacaacgactggcagcaatcaagctacagctagctcggtggttaagcaacagacggctgagatctcatttgtgaacaagacagatgcgcagcctgaacaaataccagccaaaacggtgtcattcaaagaaggaacctctttaatggagataatgaaggaaaattttgatttagtggaagacaaaggcatgatcaccagtattgaaggattggcgcaagatgaagcggctggttattattggacctatacgatcaatgacgagatggtcaataccggcgcaaaagatacatctcttaccgaaaaggatcgagtcgtttttacctatgagaaattttaaaccgacaaaaatgtctttttccgtgcaagagattgcttatcttgctttgctagtagcagcatcagtggtggggcgtacactgtttcaaccactgccaaatgtacaaccaatgaccgcaattttcttattggtggctctttatttaggctgtgtcagaggactgatcgtcgcattgctatcccttttgattacgaatttttacatggggatgggaatttggacgattgctcaggcagtaagttatacagtcgtgatcctcatgatgagcgggttaagacatgttcaaatcgttaaacgttccttgatcttgcaagtgatttttagtattttagcagggttcctttatggatttgtggtctccttactcagcgtgtatctgctaggcttaccaagcttttggggctattatctgcaaggaataagttttgatactctgcatgctgttggaaatggcttcttttatggactacttgcgccaatatttcgacgactttttcaccgttattatccagctaaaaagctcattcattagtgcaatctgctgattcagcgctttattgcattcattgccagtgtcattgatctgtctcaaagaatgatcaatgacactggtttttatatcgatatctggcaagattctccttgtagatgctgctacaagcataattgtgttgttctcttacaaaatcgggtattcttaacctatactggaaagggagcggtttcaatgaagtggatcgtaaaaaaagaagatctagaagcatatcggacgagattcaatgggaaactggctggctatgctgaagaagctaaagtaatggcgattcctttgccaaagtattatatcgtaattgttgatgaagaaaaaattagtttgattcaattggatttgaactttgaacaaaaagccatggaaaccgtgctgatccatgagatcaccacattgaaaattactggtgtcatgaacaaaaaagtgttgatccagacgccttctaaaactatcaaggttttgattaaaccgatggcgatcggaatcaaagaagagcagcaacagttgatcgatacgtttacccggatggcgagctgactacttattttagaggaaaaatcaaaaacggatcaaacgccaagctggcggattgatccgttcgtttattctggggttcccacaattttgatgtattcatcgatatttttgattttcatatgtttgatcactaactgttcacgtttgttccatttgccttcgacttctagctggtacttgttgagaggtaagcgtaaaacgtaactagaaaggtaacggtctttaataatacagttgatgattttatggtcttctaataattggattccagtcagcatcatcggagtttcttgaaaaacacgactgttgactaacaatcctacatgtgtttcattcattattcgatcctttctgagaaaaataaattctcgaatattcttcttttctatgttacccgatttatctaggaaaggcaattctggaaaacacctagcaacgcaaatcacggaataaaacaactggtgaagaggaatcactacacgattgaatggcagaaagtttttacagaaaaaagacacagaaaaaaagatacagaaaaaaagacagaataaagagatctgaaacggcgagacaaaaggaatgaacacaaagaatgaataaataagaagcacacgaataaacaaggatttttgatggcacttaaagagaaagcgtgcgaaaacatatcatttcttaacgtttaaaaaaggcaactttttgtttgaagtagcttagagaaagggagttaagcagaaatacgttcttctagaggaaatggcacctgtaaaagaacgaggactgcaagcttgaaaacaggcatttcagcagatttctgttaaaataataactataaaagaattggaggagacacatatgaaaaaatctggattcgtagtaggtttgattggcgcggcttttggtctggcagtttataataaaatgcagaagatgactgtcaacaaagattctgttaaaggcaaagcaaaagaagttgcgggaaatgtcgttggcaacgaaaaaatgcaagcagaaggaacattggatcaagttgtcggtgcttctaaagaagtactaatggacttgaaaaattctgtgacctctaccattggggttggaactccagacaaggtggctggtaaagccaaagaggcagcaggcgatatcacggatgatccgacaaaaaaagcagaaggctttgttgatcaagcagcagggcattctaaagaaatcattgcagatcttaaagacaaatctgagtcaatggcacaagatgtcaaagacaaattcgaccaaaaataggatgtagtgagagacaggccctctgtgcctgtctttttttttgtggctttttttgcaaacaaaaacaatgatcctgtcacctgaagagcgacaagaacgaaggatcggtgtgcaatgatgggatcgctgacaaaagcagtaattgatgcttgacacatgaatgtacgttcatatataatgaaaatgtagatatgaacatatattcatttgtaagcaaatgatgcactaactttgaaggaggcttttcttatgtctacccactcttgcaatcattcaacaccacacactcatgcagcagaggcaagccattcccatggcaacgccccgttacgcaattatttagtaggagttattctttttattgctgctttattggtaccgcaattggtcgttaaagatttattatacagtgccgctattcttttagcagggtatcatattatttgggaagggatcgaagacaccatcaaagatacccgcaaaagcagacactttaaaccgaatgttcatttattaatgacattggctgcctttggttcagtattgatcggcaacttcaatgaagctgccttgctgattctgatttttgccggggctcactttttggaagagtatgcagagggccaaagccgcaaagaaatcacgaacctcttgaagttgaatccgacagaagcccgtctggttaaggcagatggcagcattgagaaaattgcagcagagcaagtcaaaaaaggggataggctgcaagttttaccaggggaccaaatcgcaacagacggtaaaatcctctcgggaatcagcagcatcaacgaagcctccatcaacggtgaaagtgttccccgtgaaaaaactgttggggatgaagttttcggaagtacgatcaacggtaacggcacttttatgatggaagtgacaaaagacagcagtgagacagtttttgctaaaatactctctgttgtggaatcggcacaaaacaatcaatcaaaaacagaaacccgcatcaaaaaaatcgagccgctttatgtgacaacggtcttgattttggtacccttatttattttgacagcaccctttctttttggttgggattggtcaaccagtttttaccggggactagtgatgatgatctctgcttcgccctgtgcattagccgctagtgcagtacctgctagcttgtctgctatctcaaacttagcaaaacggggcatcttatttaaaggcagttcttatcttgcaaatatgggacaaacaaaagtagccgcctttgacaaaactggcacattaacgattggtcaaccacaagtgaccgatgttttctttgctgaagaaacaactgaagcgcaccgtcaagagtgggtatcgctgatcttggccatggaaaagcaagcgaatcacccattagcggctgccatcgtagagcattttgagaaacaagaaaaggcacaaccattagaactttccgttaacaaccaaattggttccggtctgacggctgtagttgagggaaaaacctatcgaattggcaagccagcggcgacgtttgcgcattcatcatttgctgagcaacgagaaaccttggaacaatcaggcaaaacggtggttgttttttcggtggatgatcagccagttggactgatcgcattgatggacttaccgaatcctcaagctaaagcggtcatagatgaactgcagcaatctggtattcgaacagtcatgatcacaggagatagtcaagcagctggacaagcgattggtgatcagcttggagtagatcaagttgctgcaaatgttctgccagaaaataaggctcagattatccagcagttgcaaaatgaatacggtcagacagtcatggttggagatggtatcaatgatgcgcctgcattggtacaggccgatatcggttttgctatgggggaaggatcggatgttgcaattgaagtgggggatgcggtgatcatgaaaaatgatctaacacgctttatctacgcactaaagaccgcaaaaaaactagatcggattatttggcaaaatattttcttctctatgtttattgtggcattactgatcgtattgaatttgctaggcaaaatgaatattgggttaggcgtctttgctcatgaaggcagtacattactcgttttattcaacagcttgcgcatgcttgcaccaatgagtgagacagtcgcccatacatcaaaaaaataatcaaaaaacgcttatgctgatttaatggccatccagcataagcgttcgcttttttattaaacaatgtcattgattgtacgctgcagaagagcgaggaaattggtcgatttttgctaagcgctgatcgattcgtttgatgatgccttctgaaaactcgagattccggatagaagagcgagccgcaagcaacaattgtttttcttgcatcaagtccttttggatccgataaatattggctaagcgttccacatattcataatgggtgtagtccgtctggctgatcaaaaacttcaatagatctgctgcctgcatatacgcttcttgcgtataataagtgatggcttcacggtataacttgatttcaaattcttcgattttttgggaatttgcttttaaatcccgccattcattgattgaaatttttttttggatatttcccaaatcgtcatacaaaaaaatcacagggacgtcattgggatgttttgtttcttgtttgatttttttcatgtcgtacctcctgcgttttttgctccgtttttactgatcatttctcgttgatacagtctattgtaaaagcaaagcaacaaaaagtctacatgaagatgtcaaaagaattgttcttttagcgcattctcatcttaataactacgttttctttgaaaatgattgattaaatccgagatccccataaaaatcaagactccgccaaaaatttggaagaacaaaagccacgtttgaaacggattgaaaacaagaatgatacctgccacaatcacgaataaactgaaaagcaaaccagtgataaatggtaagccattgcgtttttgattaaagcttgccatcaaacgcgtacagccactgatcgtgatcatgattcccaaaaagaatggtacgatcgataatagtccctttgcaaaaacgagaatagctgcggcggcaatcaaaagcaggatccccgttgtcatctgcatattcacatagccggtttgccgtttttctttgtaactggaatagagattgatcaacccaaggcaggcaacatatccggcaactaaatagacaatcgtattaaagacactgcgaggagcaatcaaaataatcaatccagcaatcaaaaataaaatcgctcgtaataaatcgtatcgttggattttctcgaaaaaagtattcataagttcagttcctcctttttttactattgtagcggatttctttcaaaatagaaaatagaaacgcgttgtaggataattctgcttttgaagcagcaaattatttggtaagatagatgaaacaacaaagaatggagaaaactatgagtgtattaacgcttttaatgtgtctgttcacggtcgtcttgtatttgtttctcgctgtcgtccgcaaagacattcaaattgttgcagccagccgtaaaggcggaaaagcagcaattgctttcttttcattggtggtcattatagcaatgttttttatggaagaaacctttgagaaccgcttgcgaggggtcgtatctggattgcttttcttaagttttgtttttgatagcagagggttagctgaagatcgattcattattcatccactaaatattcgcgggatcttgtatcaggaagtggatcgggtggtactgtatcaggagagcaaggaccaatggatcaaaatgaatttcttccgaagagggatgcgaggaccactgttgaaattcgagcgtccaatggaagaattggtcctgtttttgacggagcatctaaatgaaggaacaccgatcgatattctagttgatcaagagccaaaaggccattaaatttctttaagcgatcatataaattgagagaatcaattggccgggcccctttgactgcaaaagcaaagagacccggtcaatttttcacttgaagggactatccagttgatttttttggcaaaattcgagtacgccgaatacaggaagcaagctaggtttctgaccgaacgttttgctattttttgtttaagaagaacagggtcttacccttaaataaagggaatatggtagaattgagtatcaactttattgttttaattgaataggtttacatacaaaggaggacgatgctgttggtacaaataaaagaggtcctcaaaaccgttttgttcgttgctctgtttgggctgttactgttttcgttgcgacaatacgtcttcacccctgtgatcgttaaaggagattctatggatccaacattgcatgatggggagcgtgtgatcgctatgaaaaacacccaaatcagccggtttgatatcatcacatttgaagcccctgatgaggtgggaaaaaactacattaagcgtgtgatcggattacctggtgatgtggtggaataccgtgaagacactttattcatcaatggggcagcatatgaagagccttatctttctgcttttcgttcaaaattaaccgatggttatccactgacttctgactttacgatggctgatttcggtgttgaacaaattccagaaggaaaattgttggtgttaggggacaatcgccgaatctctaaagacagccggaccattggtttgattgatcagtcagccgtattaggagatgtcaaatttattttttggccccttaaagatttcggaagcattccgaatcaacactctgagtaagcggaagtccgactcgctcagagcttttttttaaaagaaaatttgttatactatttgttatgaagacaatgaaagaaaaattgtcaacggatcaatagagagcatcataactgttatttttcatgcgcaggtttggtagatgcaggagttgatctttacttacgatagaagcgacgataaaagtaaaggagtcttcgtatgagtttacgatttatactaggcgatggacgctgcgatcacgaacaagcgattttggatgcagctaacgcttggttggaaaagccacaaacagaagtcttttttcttgtccctaactacaataagtttgaacgagaaagagagattctgcaggcgctaaaacaaggcactggagattttgcctcgattcgagctcaagtctatagttttcaccgtctggcctggttctatcttcaacaaactggctggttgtcaaaaacggccattacagataccggtgcaaccatgatccttcgcaaaatacttctcgatttggaagaggagttgattctttttcgaggagaaatcaataaacctgggtttattcaacaactgttgtctctttatcaagaaatgcagacaagtaatatcgcaaccgaagatctgcatctcggtggaacgatgaataggagcaacggagaggatgcgttaaagttttccgaactcgcattgatctttcagcgtttcgaattagaaatggtgacccgggaactgcaagtggaacaaccgctggcactactaacacgttatctgcagcaagggtctaaacccaatgaattaatgaacgatcggcctgatctttcggaatcattatttatcatcagtggtttttcagcattttcaactcaagaacagagtgtattaaaagaattgatgaaacaagggcacgtcgttgtcgatttgcttttagatcatggatatccccaagaattaccttcaccattagatttgttctatgaatcgggccgcagttaccatcaattatttcttgacgctagaacggaaaatgtcgccatttatttggatcaaaagctttcaccttctgaagcacagcaagtgacactagagaaagctgccgcatacaatgaagtggaatccttttggcgtaaaacccagaatcagctccattatcagcagcagcaaccagtttcaccgtatctagaaatgtggaaagttggcaatcctgaagaagaagtccggcaaatggctgcgaaaatccgcgcattgatcagcgagcaaaaaggagcaaaactgcgttatcgagacattcaagtcttgacactgcaaccagagatctaccatcaatatattccaacgatttttaaagaatatgagattccgttttatattgacgaagagcaactcatggctcagcatccgctcgttgaattcttgaatgccttctttgcttgtgcagattatggctttcgtttaaatgacatttttcgactgttgcgtacggaactttatttgccacaagcattccaacaacaagaagactggctggctgcccgggatgcatttcgacaattagtagacattacagaaaaccaagcactggctcataacttccaaggaaaagattggacccgtgagagagactggctcttagtggactatacattgacaggagaaaacgcatctggcatcgctgaattgacagattatacgaatcaattgcgccgctatttccgtcaagatatttttggctccttgaaaaacattcaagagacaaagacgaaccgggaagctgcaggtgctttataccaatttttactttcagcaggtgttgaacagcaattgattcattggcgagatcaagcaatctcacaaggaaaactagaacaagctcgcaaccatgaacaaacatggcaagctttgatcgatcttttagatgaatttgtggctatttatggcgatgatcctttcgaacagtcactctttgaagaagtattgatgacgggtttggagaatctgactttcggtaaaattccgacagcaatcgatcaagtcaatattaatcgttttgatctagtacgacctcggcaagcaaaaatcactttcgtaccaggattgaatgagacggtgttgccaagaaggatcgaaaataaaacattgttgactaacgaagaaagacaacatctcaatcaattgtttgcgggagaaaaatatctacgcgatacgattatcgaaagtagcgccaaagagccgtttcttttttatgcgatcttattgtcttccacggataaactctatttgtcttatgcatgcaattttgatacccagcaaaatatcaaattgtccccatatctggctcgtctgcttgaatggttagatgtttctttacaagaccggggcatcttatctttaaccagtgatccagaagcctacgtcggcacgtatcggggattaatctatcagttgaataatctaagtcagcaggcaagaaaagaacgacagaatttgccggcacagtggcaacgattcaaacaggctttattgcattcgtctgaaaagcaattagcccttagagtatttgaaagccagacccatcaaaacattccagtcccgttgtctcaagataaagccgttgctttatatgggccatccatgtacagttcgatctcgcaactggagacattctaccagtgtgaatacaaatattttgtcagttatggactacgcttgaaagagcgggaaatctatggacttaactcagcgatgactggtgaatttttccatgatgcactcgatcgctttgtcaaagtattgatcagtgagaacatctcattgacgcagctgaccatggatcaacggctccaatttgttgaaaaagtgttgcaagagatttttggagaagtccgctatacattattgtccagttcggccagaatgaattttattcgttatcaactaggtaagacgattcagcgagtagcttgggcattaacgaagcaaggacaaaaaatgcacttctcacctcaaaaaaccgaagtactgtttggacagatcgctggcgctcaagggatcaatggcatcgagctgcctttaagcagtgggggcaaactgcatgtgcgaggaaaaatcgatcgggtagatgcagcaaaaaccgaagaagagcagtggctttcagtcgtagattacaaatcaagcagtcgtgaatttgatttgacagaagcttactatggcttagcaatgcagttgatcacttatttagacattgcgctgaatgatgctgtgcagctagttggtacagaaaatgtgcgcccggctggggcttattatttacatgtccatgatccagtcttagatggtcaaaaatcctctgaagaggaacggttgaagcaattcaaatatgatgggttgtttctggatgaaccctcattgtttccacttttggatcatgaattgtcagacagcagcaattcggcagtttttccgattcgcaaagacaaaagcgggacgtaccaaaagacaccacaagccaaaaacaagttttacactgaagaagagattcgcttgttgaggcagcacaaccgcaaaaatatgcagcaaggtgcggagaaacttctcagtggcgaaattgccttgaatccgtcttataagctgaaagacaaaaagcgcgcctgtgagttttgcccatttcgcagtatttgcgatttcgatgtgatgctgcaagaaaataattatcatcgtctagagaatttatcgaaagaagaggttttacagcgattaaaggaggaagagaatgactaagatccctctaaaaccacaaaatgaaacatttactgatactcagtggcaagcgatctttgataaaggagacaatctccttgtttctgcctcagctggatcaggaaagaccaccgtccttgtgcgacgtgtgatcgagaaattaaaagcaggaagtcagatcgacgaattgctgatcgtgacctttaccgaagcagcagcaagagaaatgaaagaacggatccaagtagctctgcaaacggccattaatcaagaaagccaagagcaaaaaagacaacatttcgttcggcagttgcaattattacctaccgcaaatatctcaacactacatgccttttgtttaacggtcattcggcgtttttattatctgatcgatttggatcctggatttcggatgctgacagatgaaacggagattttgctgctgaaagaggaaatctggacacaattacgagatgcacactacgaagcaaatgatgaagccttctttcgattaaccgaaaacttcgccagtgatcgttccgatgagacggttggtgatttgattttgtcactctatgattttgcccgcgccaaccctgatccagaaaagtggctggacggtttagcggtaaattatgaagccgcggacaatttaggggagaatcacctctatcaggctcaaatcaaaccgacgttggtagaaattgccgcaacggcagagcatttgctggcagcggccaaacaatttgcagatcagtcaccattaatggaaaaagcagcagcactcgttcaagcagagatttctcaagtccaagaaattcaacgagttctggcaacagacgatctatccgtcttatatgatcgcttgactcatttgacctttgatcgctacccaagctatcggaaagaagaacaaaaagaactttcacaggaaatcaaaccgttgcgggatgatgccaaaaaactattagaacaactcaagggatattttccttatccaccagcagacatgctgcaaatgctgcaactatctgaaccgatcgttgcgactatggcagagatgaccaaagagtttttgactgcttttcaagcccgcaagctagcaaaagggttgttggatttcaatgatttagaacatttcacgttgaaaatcttattgggtgatggcacaggcagcgatgcttctgtttattaccgcgataaatttgaagaagtgctcgtggatgagtatcaggatatcaatcgactgcaagaagcgattctgtattgggttcggcaagtttcaggagaccatggaaacatgttcatggtaggggatgtcaaacaatcgatctattcatttcgcttagcagaccccactttgtttatagaaaaatatttggcatttgaacatcaaaacgggggacgaagaatcgttttagcagaaaatttccgttcgcgccgcgaagtgcttgattttacgaacttggtttttcaacaattgatggacgaacaagttggacagatcccttatgatgacgcagcggctttagttccgggatttccgagttttcctgaaagcgacgcattcattccggaacttttgctctatgaaaaagaagctgaaagtactacgaatttgattgaagacaaaacggaaggagaacttcacgtcaccgcaatcaaaattcaagaactgatccaatcccaatttatgatctatgataaaaaaagacgggaagaacgtccagtcacttatcaggatatcgttttactgactcctacccgcaaaaataatttggtcatcttagatgttttcaaaaaattcgggattcctctggaagtcaatgatgcccagaactattttcaagcaacagagatccaaacaatgatcgcattgttgcaaatcattgataatccttatcaggacattccattagtggctgttctccgttcacctatggtagggctaacggaagacgaactagcagagattcggctagcggatcgtaccagtgagttttacaaagcggtcttgacttatcaagacaaccaaaaggggactgtttccgctttaagcaaacgagtggatgattttttaagcgaattgaatcgttggcgggaagcagctcgcagactgccgatccctgatttattatgggatatttatgatacaacggcttacttggattacgtggttggcttgccagcagggcaacagcgctatgccaatttgattgcattgatccaccgagcagagaaatatgagaaaagcagtttccgaggattgtatcaattcattcggtttattgaaaaaatgcaagaaaaagataaagatttggcagaaccgttggcgacgccagctgaaaatgctgtgcgggtcatgactgtccatgctagtaaagggttggagtttcccgttgttttcttattggatacaacgaaatttttcaattaccaagactttcaaaagcgttatatttttgaagaacaacttggcgcaggtatccaatatatcgatgcttcggaaaatatcaaatatgaaacgattccttttcaagccatcaaacaagttcgtttgaaaaaagccctctctgaagaaatgcgtaaactatacgtagcattgacacgggccgagcagaaactgtatttagttggttcttataaggatcggcaggcagcctttaaagcttggcaagcggggttgacacaaagtcagacagtccttgacccggctttacgtttagttgcaagaggcagtctaatggattgggtcggtttgacattgattcgtcatccagagatggagcagttttttactgatgccagtgaacgaaaaatgacgatccatcatcctgcaagattccagatccattggtggaatcaggatcagattgatcagcaattgcaggtgcagccgccaacagaggcagttgtggctccgacaccaagtactacagccccagaaagattgctgaaccgtttagactatcagtatccttacagcaaagcgactcaaaccaccagctatcagtcggtctcagagttaaaacgtctatataatgatccggacgatcaagatattactttactggaatggcattccgcggatcaaaaattggcacctcagcgctttcgttatgttgagactgaattagctaaaccgcgttttttacaagaacaaaaaccgcaagctgcttcgatcgggagtgctacgcatctagttatgcaaatgctgccgctgactgaagtaccgacggaagcatccttagcagcttttatcgatgaattggttgaacgtcagctctttacgaaagatgttgccgacaaaattgatcaagcgagcatcgtgtggttctatcaaacagccgtggggcaaactttgatcaagtatgcaacacaggtaaaacgggagcagccattttcaatgctaaaagaagctgccactatttttgaaggatttgatgaaccagatgccgaattattgatccacgggattattgatggctatgtggagttgccagatcgaatcattttgtatgattttaagacggatgctgtatttggcagtgaagcacagattgaaaagcgcatgcgggatcggtattttggacagctaaaactgtattgccaagcgttagaacaagctttgcagaaacctgtgactgagacatatctggttttactagccgctaagaaaataatcgaatggtaggccctcgaacgggattccttacaattcgtaagcgatgtgctataatgatgcaaagaggtgatagaaaatgataaaagtggaaacagattacgccctttgtcctaaatttgaaaaagctttttcgattctagggaaaaagtggaatggcttgatcattgatgtgcttcttgaagatggcaaacaacggtttgtggatcttgccaaaaaaatcccccaagtgagcgatcgggtattggtggagcgcttgaaagaattagaacgtgaagaaatcgtctgcaaagaagacaatctttactgtttaacaccaagaggggtcgcacttgaaaaaagtatgatgagtgttaagcgctgggcagaaacttgggtcagagaagaagaatgcagttgatttctggcaaataattaggtacactaaggtcaatcgaatagttaaaaagcgttgatggaaactagtagtttggctgaaacaggaaagggagacttgtcatagactgaaagcaagttctgtattcgaaaaatgaatttcatttctggagcttactgaacaagaatcagtcggcagtcctgctgtcgttagtagaagtgagtgcgtggactttgtccacgaatgaggatggtaacacgagacgtcgttccttttttaggaacggggtctttttttcgtcttgacttatcagctattcacaaagaataaggaggaaaaacatgtctttacaagagaaactagagtcattgaaagaagtaacgctttcaaagatcaaagaaagccgttcaatcaatgaattgaatcaaattcgtgtggatgtccttggtaaaaagggacccatcacggaagttttgcggggaatgaaagagttgtcagcagaagagcgtccaaaagtcggcagctatgccaatgagatccgggatgcgattacacaagcgattgaggaagcaaaaacttcattagaagcagccgcactagaaaaggcattggctgaagaatcgattgatgtgacattgcctggcaagcggatgccacaagggacccgtcatgtcttgacgcaaatcatggaagaaatcgaagatatttttgtggggatgggctatcaagtggttgaaggattcgaagtcgaaaaagatcactacaattttgaacgaatgaacttgccaaaagatcatccagcaagagacatgcaagatactttttatatttcagatgaagtcttgattcggacacacacttcaccggtgcaagctcgtaccatggaaaaacatgatttcagcaaagggccattgcgaatgatttcaccaggaaaagtattccggagagacaccgacgacgcgactcacagtcatcagttccatcagattgaaggactcgtaatcgataagaatgtgacgatgggtgatcttaaagggacactagaagtcatgatgcaaaaaatgttcggggctgatcgcagcattcgtttgcgtccaagctacttcccatttacagagccttcagtagaagtagatgtcagctgtttcaaatgtgggggagccggctgtaatgtctgcaaacacaccggttggatcgagattttaggcgctggaatggtacatccgaatgtattggaaatgtccgggatcgattccaaagaatactcaggttttgcatttggtttaggacctgaccgggttgcgatgttgcgctatggcgtcaacgacattcggaatttctatcaaaatgatgtacgtttcatcagtcagttcaagggggaataaatatgttagtatcttacaaatggttaaatgactatcttgacctttctgagatctcaccaaacgagctggcagataaaatgtcagtcacagggatcgaagtcgaaggaatcgaagtgccagcagcgggattgaagaaaatcgttgttggggaagtcaaagaatgtgtgccacatccagattcagatcacttatcgatctgccaagtagatatcggtgaatctgaattatcacaaatcgtttgcggtgcgccgaatatcaaaagcggcatcaaagtgattgtggcactcccaggttcacggatcgcgggcaatgtcaaaatcaagaaaggcaagatgcgcggacaacaatccaatgggatgatctgttcgctgcaggaattaggctattctgatagtgtgatccctaaagaatatgcggagggtatttattacttgcctaccgatgccgaagtggggaaggaagtctttccctatctcgatatggatgatgccatcatcgagttgtcgatcactccaaaccgggccgatgccttaagtatgcggggggtcgcttacgaggtaggagccatttatcgacaaacaccaaaatttgagaccattcaactgaatgaaagtgctgtgaaagccgcagacaagatcaaagtcagcgtagaaaatcaaaaggatgcgccagcctatcaaattcggatcattgaaaacgtaacgattgcaccaagtccgcaatggttgcaaaaccgtttgatgaatgaaggcattcgaccaatcaacaatgtcgttgatattaccaactatattttgctgctgtttggacaaccccttcatgcattcgattatcaaaaattgggcagccaagaaatcgtcgttcgccgtggcaaaccgcaagaaacgttggtcactttggacggagagacacgaacgctagatgataagaacattgtgatcactaatggaaaagaaccagtcgctttagctggtgtcatgggtgggttagattcagaaatcacacaagataccacaactgttgctttagaagccgccttgtttgacccactagcgattcgtttgacgtctaaaaaattcaatttgcgcagtgagtcatcttcccgtttcgaaaaaggcattaatcaggctgcgatcgcggaggcttgtgatgcagccgctgctatgattgcggagctagctggcggtacagttctacaaggtgctgtcaaaggcgctgaagtgacccctaaggatgttcaagtcacgatcacattagatcggatcaatcgctacttaggaacacaaatcacgattaccgaagccaatgagatttttgacgccttaggttttggctaccaagaaaatgaaggtacctatcaagttgtggtcccacctagacgttgggatattcagatcgaagctgacatcattgaagaagtcgcccgtatctatggctatgaccgtctgccatcgacacttccaagtggtgagacagttgcggggagcttaaccaaagaacaacgcttgactcgcaaagtacgaacactcctagaaggaaatggtgtgagtgaagctatcagctatgcattgacaaccgaagaaaaagcccgtcaattttgttggttagagagtcaggttacccgtctggattggccaatgacagaagagcgtggtgtcttaagaatgaatctactttcaggactgctggacgacattgcctataacttggcccgcaaaaatgccaatgttgcgttgtacgaagtggggcgcgtcttttacaaaacaagtgatgaccctcgggagctaccaacagaaaacaatcatctaggactagccatcactggcgccatcaccgaaaaagattggcaagaagctgaacaaaaagtcgatttctatcatattaaagggatcttggaaaacttgtttgcaggtctttctcttacggatcagattacttatgaaaagacaacagcaatcaaagaacttcatccaggcagagccgctgctatcctcttacaggatgaagtgatcggttacctagggcaagtccatccaagtacagcaaaagcttatgatctgactgagacatatgttgctgaattggacttggatcgtttgatagcaactgaaaatgcagcgctcatttatcaagcagtttcgaaattcccatcagttaaccgggatattgcactgttggtggatgagaagacgtcgaaccaaacaatcctgcaaaccattgaacaagcagcaggccgtttcttgacggacattcatctatttgatgtgtaccaaggaaagaacatcgatagcaataaaaaatcaatggcctatcgattgacttttgctaatcctgaagcgacattgacagatgaagaaatcaatcaagcaatgtcgaagatcacacgtgtgctagaagaatcactacaagtagaaattcgttagtcccattgctgtgagaggaaacagtgacataaaaaaagagtgatcttgaggaatcagcaagattgtagcatttgcagggggaagaggttctcccttgctatgctacaattttttttataatggatagagtacatattctcatggataaccacagctcgaagagttgcttttccagttttattttatggaagaaaggatcgattgatggaacaactgacggtttacgatgcacaaaagcagccaacagctgcgacgatgttgcgggatacgccagtccctaatgacggctaccgagttgtggtgtctgttttattgtttaatgaagccggagaattactgattcaaaaacgacaatccacaaaaaaggctggcctagttattgggattatcctgctggcgggaccgtcaaagctggtgaaagctgttatcaagcggcagaaagggaactattagaagagttagggatgacactttctttagagaaaatccctagtcgtttaacagtgaaatttgaagaaggctggaatgaactctattttgttcaatggaccggcgctaaccctgaactttgtttgcagtaagaagaagttgctgcagcaaagtgggtcaatgaaaaagagtatcgcgcattgatcaatgggtataaatttattccttacttatatgcaccgatcgttttctcgcttcaaagtcatcctggggaatattttccggtctaagttcttactcgtgatggtagcttctttttgatagaaagcgattctgtcgtgattgagaaaaatgttctcgaatggtgtttgctcacatgtcaatggtagttgagcagttcgcttttttatttagggatctttaaataaaagatagtaattaaaaacaaacccaccaagcatactggtgggtttgttggttgttcatatttatgcaaagtagttgatccccattgcttctttcacttctgccaaggtttgtgctgcgacttgttctgctttttcgctgcctttttttaagaggttcatgacttcagccgggtccttagcaaattcttctcgtcgctgacggatcggagcaaattcttcttctaagacatcgatcagatagcgtttgatttttacatcgcctagaccgccttgacgatagtgctctttcaatgcagcaattttttctaaatctttgccgaagacatctaaataagtaaagaccatattgccttcgacttggccaggatctgctacatggatatgatttggatcagtgtacatgctcatgactttcttttgaacgatatccgcattgtctgccaaatagattccgttgttcaatgatttgctcattttaccatttccatcgataccaggtaaacgtcccattcctttaggcggaagaactgctttaggttccaccaatacgtcactatagatggaattaaagctatgaacgatttcttgtgtttgttctagcattggtttttgatcttcaccgacaggaactaagttggctttgaaagcagtgatatctgctgcttgtgagacagggtagatgaagaatccagttgggacaccttccccaaatttcttttgttcgatctcggctttgacggtcggattgcggcgaacccgtgccacactgactaaattcaagtaatacatggttagttccgacaactgagggatttgtgattgaataaataaagtcgagcgggtcggatcgagaccaatcgctaaatagtcaagtgccacttgcaagatattttctgacactttctgtggatttttggcattgtctgtcaatgcttgcatatcagcgatcatgatataaagttgattgttagggtcgtcttgcatctcaactcgtttttttaatgagccgacataatgccctaaatgaagttgccctgtaggccggtctccggttaatattgtgttcacgtttcatccacctctaaattcaatatatagttcatcttaccttgtttttccaaaagaaacaacttgttctactaagggtcgaaaaaaaacgatggacaaaaacctaacatgaggttaaaataatgaaggtttttctttggggatgatgtggaaattaaaactacctttacaaatagaaaaattttgagctataatatgaatcaaatcttttcaattactcatttatttttaaatatagacttggagtgtgaatgaatggcaatgatagaatttaaagacgtggaaaagtactacggcaaattccatgcattaaaaaacataaatattgaatttgaaaaaggtgaagtcgttgttgtgattggtccttcaggatccggaaaaagcacgatgcttcgcacaatcaatggattagaaacgatttcttctggtcacttactgatcaatggcaaagatcttttcagtaaagatgtcaaattgacagagattagaaaaaacatcggaatggtcttccagcatttcaatctttaccccaataaaaccgtgttagaaaacatcactttggctcccattaaagtattaaaacaaaatgaacaagaagcgattgccttagccgaaaaactgttgaaccgtgtaggcatgctggacaaaaaagattcttatccatccatgttgtctggcggacaacaacagcgggtggctattgcccgaggattagccatgacaccagaaatgttgcttttcgatgagccaacttctgcactggatccagaaatgatcggtgatgttttagacgtgatgaaaaaaatcgccagtgaaggcatgtccatgatcgtggtgactcatgagatgagttttgcccgtgaagtagccgaccggatcgttttcatggcagaaggccaagtattagaagatcgtcgcgacgtcgatggcttctttgaaaacccaagagacgaacgggccaaacaattcttaagcaaggtaaccaatcattaggaggaaagtagctatgagcaaaaaaatcagtacagtgctgctgcttgtattcgcgctcatgaccttttctgcttgtaaaggccaaagtgctgcagaacgtgatgtgttagcgagcagcaaagaaagcaaccaaatcatctggggagtcaagaatgatacccgattatttggattgatggatattgcgacagctgaagtccgcggatttgatatcgatatcgctaaagcaatcactgagcatattttaggacgtgacggaagtgctatttttgtcgaagtcacatcaaaaactcgaattccgctattaaaaaatggcaatatcgatgcaatcatcgctacgatgaccatcacggatgaacggaagaaacaagtagatttttctgatgtttatttcgatgctggacaatctttattagtagccaaagatagcccgattcagggaatcgaagatttaaatgccaatacgacggttttagtcgtcaagggatcaacatcagcgatcaatatccgcaaggcagcgccggaagcaaaaatcttggagttagaaaattatgccgaagcctttactgcattacagtcaggacaaggcgatgcgatgacgacagataatgcgatcttattggggatggccagtgaaaatcccaactatcatttagttggcggtacatttacaaatgaaccttacggaatagctatcgataaaggacaagagcctttcttgaaagccgtcaaccaggcattgaaagaaatgcatgaagacggtacgtatgatgaaatttatcagaaatggttccctgatgatgcatctgggaaagttgattaaaggaggaaatttgcatgcttgaattgtttcaaacttacggcgaccagtttttctctggtttcaaatatacgattttctccagtttactggctttattctttagtttagtgattggtacattgatggcgatatttcagctgtctaccaatcgatgggtcaaagggatcgctaaagcgtatgtcgagtttttccgaaatattcctttgttgatcatcgtgatgttcttttatgtcgtggtgccgatgtattgggtgacttttgacggatttcaagcgggaacgatcggcttgaccatctatacgtctgcgtttattgcagaaacgattcgttctggaatccagacagttcctaaagggcagatggaggcttctttgtcctctggattcacgtacagccaggccatgcgctacattattttaccgcaggcttttaaaatcgttgttccgccactaggaaatcagtttatcaacttggtcaaaaattcatcgattttagcaatggtagctggtcttgacattatgtatcaaggtgacttgattgccagtgaaacctttaatactttcgacacctatattattgtcggaatcttttatttgattatcacattaccattatcctatttaatggtttatcttgaaagacgttgggctgtacgctcatagaaaggagacactaaatggaatttttcgaagctttttctgccatcaatcttcggtttttgatcgacggtctccgagtaacgatcgaagtctccgtcttatcgatcatctttagttttctgattggcggccttgcaggagtcttgcgtttcactaacattccgttcttttcaaagattttaggtgtagtgatcgatgtgattcgaaacctgccgttgctgctgattattttcttcacgtactttgcattgccgcagatcggtattcgtttcaatattttctggtctgcagttgtggcattgacgatttttgaatctgccatgctctcagagatttttcgagcggggcttaatgccgtaccgaaagggcaaatggaggctggtttgtctaccggtttgagttatgtccaagtgttgcgaagcattgtgatgccgcaagcttttaaagccatgctgcctgcgatcgttagtcaattgatctcattgatcaaagatacgtcattggcagtgattatttcacttccagaactgactcaccatgctcgaattatttatggacaaaataccaattatgtattgccaatgtttcttgcgatgactgtgctgtacttcatcgtctgctatgccttatcgctgctttctcgcttcttggaagcacgtcagtataattactgatttcttgaggctgcatagaaacagtgattactagatccgaatgacctttgatgtcatgcagttgctttccttggacgagagtagccagagcatcggaggttttcggatctttttttgaccgcaataggttcattgttttcttggataaagcaatacttgaaaaatcagtaaaaaaagtccaaaatggaacttagacaaatttctttctttcattaaaaaggatggacaactatgacaaataaacaacccattggctttatcgattctggtgttggcggattgaccgttgttaaagaagcgattaagcaattgcccaatgaacatattatttatcttggtgatactgcacgctgtccctatgggccgcgtccggcagaacaagtcatcgagtatacatggcagatgaccgaatttttattgcagcaaaacatcaaaatgttggtgattgcttgtaatacggctacggctgtcgcattagaagaaatcaaagaaaaattatcgattccggtaatcggagtcatactgcctggctctcgagctgctgtcaaagcaacaaaaaaccaacagatcggtgtcattggaactgcgggtactattaagagcaatgcgtatgaagaagcaatcaagcttaaatcacctcgttctgtggtagttagcttggcttgtcccaaattcgcgcctatcgttgaaagcaatcaagcgcaatcatcggttgccaaaaaaatcgttgccgaaacactgcgccccctcaaaaataagaaattagatacgttgattttgggttgtactcattatcctttgttgcggtctttaatccagaacgagatggggagccagatccagctgattgattccggtgcagaaacagtgggtgaagtcagcatgctgttggactactttgctattgccaatacaagccaaatggcccaagaaccggaatattttttttatacgacaggttcaacaaaattatttgatgaaattgcgaacgaatggttgaatgtaccggtccattcgcaacatatcacattaggaggaaattaaatgcgccatgatggcagaaaagcgggaagtatccgtccagtagaaatcaaaacaaatgtattcaaacatccagaaggatccgtcgtgatctcatttggtgataccacagttatttgttccgcaacgatcgaagaccgagtgccgccttttttacgggactcagggaaaggctgggtgacggcagaatacagcatgctgccgcgagcaacgaatacccgtaatcgtcgagaaagtgcaaaaggaaagctgtctggtcggacaatggagatccagcgactaatcgctcgttcgttacgggcagtggtagacttggaaaagttaggtgaacgtagcattgtagtcgattgtgatgtcatccaagcggatgggggcactcgaacagctagtatcaccggtgcttttgtggctttgcgattggcgatcgatcaattattgaccaaccatgagctaacggaagatcctattaaagaacatcttgctgccatcagcgtaggaattttacctgataacacttgtgtcactgatttagactacgaagaagattctgcggctgctgtagatatgaatctcgtaatgacagagtcaggccgtttcattgagattcaaggaactggggaagaagcgacatttgatggtcagcaattgaacgaaatgctgatttatggcaagacagccattgaagagctgattgcctatcaaaaagaagcattgctgatccaagaacagccccaatacgttattcctgagaagacgatcgtgattgccactggtaatcctggcaaagcacgagaattcaccgcagtttttggtgctgctggctatgacgttcggacattgaaagattatcccgcattacctgatgttgaggaaacaggaacgactttcgaagaaaatgctcggctgaaggcagaaacgattgcaaaaattcttgggcgacctgttctagcggacgattcgggcttaaaagtggatgcattaggtggtagacccggtgtttactcggcacgttttgcgggtgaacaaaaaagcgatgctgcaaataatgccaaattgttgtacgaattaactgatatcccagatgaacaacgaacagcacaattccattgtacattggtctttgcagctcctgacaaagaaagtctcgtagtcgctgccgattggccaggcagaattggccgcattcctcggggagagaacggttttggctacgatccattgtttatccctgttggttcagataaaacggctgctgaaatgagtggagaagaaaagaatcaagtgagtcatcgtggtcaagccatcgcgaaactacgcaatgtatggcaagagtggttggaaggagaacaagcatgaaatatttaatcgttagcgataaccatggcgatcgtcaaattctcgttgatttgctagcagaattttctgggaaagtggatacctttatccattgtggagattcggaactgcaaccaagcgatcccctttggcaaacctatcaagtggttggcggaaattgtgattacagtccggaatacgaggatgcaaagattatcaaaacgcctctcgacacgatttatgtgacccatggtcatttggcagatgttcgttttggcgtgacaacactcggacttcaatcacaacaagctgatgcgtcaattgctgtatttggtcacacccaccagattgcctgtgagaaggtggggcatcgactattcttgaatccgggcagtatttctcaaccgcggggacctattcaaatcaaaagttttgccatcatagaaagtactgaaaagcagtggatcgttcaatattatgatcgtacgtttaatgaaatcgctgatttgcattttatttttgagcgctaagaaagcgaaatcaaaagtaaaaaattcattataaataagcagttttacgatatcttcttgatttttctagtaaaatagaaaagtagctgtgaaatggaggcattcagattgattggtcaaacagtagaaaaaatattattagaaaatcaagaaagttttttagtacctgcagaaaacgttgcaacggttctttacaatcatccattaaaccatgcgttactcgttttatcgaaagtcggctattccaagattccggtcctagatagtgaggatcatcttgttggattgatcagtttatcgaacgtggtcgaaagaatgatggacctgactgggtttagtatggacaacttagaaggcttgacggccgcagacgtgatggaagtcaatgtggcttgtatcaaagaagatggcgaattagaagacatgcttcatctcttagtggatcaggcatttttgcccatcgtcaatgaggaaaatgtctttgtaggaatcattacccgaaaagaaatcttaaaatctgtcaatcacctagcacatgaattagagaaacggtatatgctgatctcaaaagaggccagtcctacagacgaattacaagtcatctaataatggataaaaaagcaccccgaaaaaatcatcggggtgcttttaacgtttaagcggtcaattgacgccaatgattggcgcactaggaatggtgtagcctttagcagtcagtgcatcgattgaagccgctaaaaactcttcttttagtttccactgagttccgttggtaacatacatcgttgtccggatcgcaaaattattgttgccaaggtcgacaacaccaaaaattgctggtttcgtttggatctcttcctcgtgagcagcagccactgtttgattgacttcgtcaatgatcgaccggatatcatctaagccctctgatggcaagatacgcacatctacaacgacttgcatattggctcgtgaagtgttgctgatcgtagtgatattccgattcgggatataatggacagtcccatccacggattttaactgaaccgttcgaataccgacagctgtaactgttccttctaatgacaaattcgtcaaacggatataatcgccgacattgatttgttgctcagtaatgataaaaaaaccagtgatcagatcattcataaagccttgagcacctagtcccagtgccaccccagcaatcccagcccccgctaagagtgaaccaacaggcacgccaatcgttgacaataacgcatatacaaagaagaaacctaatgtatagtggacgatattgcggatcagcgcatggatcgtgttgattcgactggcattataggttccttttttctcgtaggaacgataaattcgttcgatgacataattgctgattttcagcaaaataccaaataaaataatcaaaaaaagcagcatcagaactttttggatcaagataccaacaatagcctcccaatcaatgttttgccaccatttctgcaaggcattcaattgtttggcggcaggctccgtcaagctggatcctgtcgaatccgttgtagcatctgtcaaaagtcgtaacataaaatccctccatctatcaataagtctattttataggagaaaaaacagaaatgcaaaattcacttgttaaatttttgtaaaaagatgaacaaataagggaatatcattagttagcaaagaaacagcaaaaactcgtctcttggcatagaccagtcaagagacgagcacgagtacatgtgatcatagaattacgataagtgaacacctttatcgacaaaaatcacttctccgatgataccgctagacaatggactaatcagaaaggcacatgtgttgccgacttcttcgatggtcacaccaacatgatcaggagtgcgatcttcagataattggatcagcttttgataatcttttacacctgtcacagccagtgttttgattgcgcctgcagagatggcgttgacccggattttttgcggggataattctgcagctaaatagcgaacgcttgattcgagagcagccttagcaatccccatcatgttatagttgggtacagcacgttctgaacctaaataggtcaaggtaacgattccggcattttctgccaagaggggtttggcatatttagtaacagcgatcaatgaatagctgctgatatcttgtgctagtgcatagccatctcttgatatatttaaaatatcacctgaaagatcatctttgttggcgtaagcgacagcatggacgacgccatggatttcgcctgcatagtctttgatggtttcaaaagctttcgcgatactctcatcatttgcaacatcacattcaaccgtatactcattttcctctagtagccgttcaagaggttttttcatgcgttcgttttgatacgtatagatgacttcagcgccttgttcttttagcgcttgcgcacagccccaagcgatactgcgtttgttggctacgcccatcacgacaactttttttccagttaagaaactcataattccactccttaatagtttgcataataatcaataatgacgatcgatagtgggtcccactatcatgatttctaattattattcataattgtttgattgtcaaactatttttttcttaataaatatttagttgcgaaaaaatcagaactatgatactttgataatcaaactataatatttttttaagcaaggaaggaaaccccatgaaaaaactattgacagaaacagaagtcatggacttgattccaaatcgctatccgatcatttatatcgattacgttgatgagattgaatcagggaagaagatcattgccacgaaaaatgtgacgatcaatgaagattttttccaaggacattttccaggaaatccagtgatgccaggagcgttgattttagaaacattggcacaagcaggttcgatcttgattttgaaatcggatgaatttcagggaagaactgcttatattggcgggatcaacaaagcaaaattccgtcaaaaagttgttcccggcgataccttgaaacttgtttttgagattacaaaaatcaaaggttctgtagggacagccaatgctgtggcaactgtggaaggaaaaaaagcagcggagtgtgaatttacctttattgttggagaacaaaaataaaataaagaccagtgcctttaagggaaattttcaaaggcattggtcttttttgcttacttagcttcttgtaaaatcttgatggatttgattttgacaggatcttttggcgtagagtcttctccgttgctattcgcctcaccggtcgtttcggctttggcaattttgtctacgacctccattccttcaatgacctgaccaaagactgtgtacttaccatctagtgtcggagcaccaccatctttgtaggcgtcaatgatattttgaggataaaattggattgctcgtccatcagagacatcatcatggttttgaacaataaagaattgacttccttggctgttgggagcgctggattttgccatcgataacgcgccgcggatatggtaaagctgtttggatatttcctcgccaaaccctttgccccaaatgctttctccaccagttccgtcaccgttagggtcgccgccttggatcataaaatcttcgacgattcgatggaaagtcaagccatcgtagtagccatttttggcatgagtcataaagttttcgacagcttttggtgcaatttctgggaataatttgattttgatcgtgccttctgtggtctcaagtgcaacaagatcttcattttcttttacttcagtagacaactgcggcagttccagagaatttaagtctactgattctgatgtggttgttttatccgaagaactagaagtagttgttgtatcattgcaggcagttaatagaaagaggctagttgctgccgccaacgttagtatcatttttttcatttgagtaagatcctttcattactagactgtctttatcatatcaaaatttagctggagtgaaaagcaggtatctattaaaaccaataggaaaggtgtagaccacttatcggttgtttgctataatgaaagaggattcatgaacaaaacacggatagaatttttaggaggtttgacggatgggaaaattaggtatttcagtttatccagaacgatcaacgtttgagaaagacaaggcttatcttgatttagcacacaaatacggctttaagcgtgtgtttacaagtttgctgcaaatcgaagatgataaagaaaaagtattggcagatttcaagcaggtagtggattatgccaatcaattaggaatggaagtcatggtggacatcaatcctggtctctttgatcaattagagatctcgtatgatgatctttcattctttgatgaaatgggtgcttatggtgtccgtttggatatcggttttaccggtgccgaagaagcgcgtatgacgcgtaatccttatggcatcaaaattgagatcaatatgagcagtgggacaaactacgtagacaatatcatgagttattcgccaaatacgaataatttattaggctctcacaatttttaccctcatcgatattcaggtttgggttatgaccattttgtgtattgctcagaaaaattccgtcattacaacttgaacacaatggcttttgtgaattctcacgaggcaacatttggtccttggccaacacaagatgggctttgttcgttggaagatcatcgtgatctgccaatcgctactcaagtcaaacatttggttttgacaggattaatcgatgatatttcagtgggaaatgcctatgcatcagaaaaagagttagctgcaatggcagaagccttcaatgcggactatactaccttaaaagtagatgttgctgaaggaatcacggaagatgaacgcatctgtttgtttgataatcttcatggttatcgcggggatcgctcagaatatattttgcggtcgacgatgactcgaatttactacaaagataagccattcccagcacatgatacccatgatatgactcgcggtgatattttgatcgataacgtcggttatgggcaatacaaaggtgaaactcagatcgcattgaaagaaatgaagaatgatggccgtgtcaatgtcgtaggaaaaattgctgcagatgaactgtttctactggatttcttgaaaccatggtcaagctttaaactaaaagacagcaaagacgaataagacgctttgtttttctaaagaactgctctttttgagcggttctttttgtttaatagctttcgtccgtgcagtgtggggaaaaaaggcgcgtttctacatatggatgagattgatggtaagaaggtgaggactgttgaaaggagccgcctgctagcaaaaatttctttactctttacttctctgctctttacatagcagcacttggtagcgcttgttgaagtgttagtttgactgtttttcgttttggtcctattgacaaatcaaaagtaaaaggggtattttgtactagaatgttttttaggagggagcaaccagaacggtgttttttattattaaaacgttattgttatttatcgttaccattcgtctggctggttttttgtcgattttcttactgattgctattttccagcaaaagcggaaacgacaacacatgaccagtgaagaatgggagacatattttaccaaattaggaactgatggctttctttggcgcttatatggctgtttttttgccgttttaggggtctttgcggtcatcaatacattttatttttggcatcagatgtgggtgtatgggatcacgttgatgttggcgggcggatttaatctttatttcaaatatcgcctgaataaggagcagattcaagcgcgtttcttgaaataaacaaccaataattatattatgtaaactagttgtcgaggaggaacaaaatgaaactacgctggaagatcgccattttagtaggggtgcttttgatagtaggcttgggctatgccggaaattatttttataattacgcagttgtcccatcagaaaaagattttttaaaaggtgatacctctggaacggacaaaagcaatgcgaatcctgaagcggaggagtggtttaccgctccggaaaatcgtcaaatgtggcaacttgaatcctcagatggattgatgttgtccggaatttacttgcctgcccaaaaatcacagcacaaaacagtgattgtcgcccatggttatatgggaaacgcagagacgatgggagtttatgcgaagatgttccatgatctaggatataacgtattggttcctgatgcccgcggtcatggagaaagccaaggcgattatattggctttggttggccagaacggaaagattatgtccaatggatcgatcaaatcttaaaagaaagcggcaaggaagaatccattgttttatacggtgtaagtatgggagctgctaccgtgatgatgaccagtggcgaaaagttgcctgccaacgtaacagcgatcattgaggactgcggttatgcttctgtaaatgaggaattgagctatcagttggatcaattatttggtttgccagcatttcctttgatcaatgtcactagtctggttaccaagctaagagctggttacttctttggcgaagcagatgccgtgaaacagctgcacaagaacactcgtccaatgttcttcatccatggtgattcggatactttcgttccttattcaatgttggcagaggtttatgctgctacagatgcgccaaaagaaaaatgggtagtcaaaggggcggaacatgcccaaagctacacgaaagatccaaaacgttaccaggaaaaaattgcggcattccttgaaaagtatgatcacttgccagaatagcaaaaaaagagcgaagatccgtagatcttcgctctttttgtaatgagtagcttataaattagcaaatttttctaacaaacgaatcatttggcaagtaaaaccatattcattgtcataccatgcaacagttttgaccaattggaagtctcctgcagtagttacttctgtttgtgtcgggtcaaagattgatccttgcgtcgtaccgataacatcgccagagacgatttcacggtcatcgtagccaaaagaaggattgtcgatcgtgtgtttcttgatggcttcattgacttcttctgcggttattttttgtttcagaatcgataccaattctgttaaagatccatcgacaacaggtacccgttgtgcgtgtccttgaagtttgccatttagttctggaatgaccaaaccaatcgctttcgctgctcctgttgaatgagggatcgtattatcagcggctgaacgcgcagctcgcaggttgcctccccgtaccgggccatccaaaagcatttgagtagaagtgtaggcatggacagtcgtcatagttcctacttcgatcccaaattcttcatttaggaaataagccattggagctaaacaattggttgtacaagaaccagctgaaatgattttgtcctctgcagtaagtgtatcactattgacattgtaaacgatcgttttcatttttcctgctggtgcagagataacgacacgttttacaccggcatctaagtgtgcttgtgctttttcttcagatgtataaaagcctgtacattctaaaacgatatccacgccattttctttcacccaaggaattttgctggcatcaggttctgcgtagacttttgtttcttctccatcaacgacgatcgcatcatctgtggcagtgactgtgcctggataggtaccatgagttgaatcaaactggagtaactgggctagcatgacggggctcgtcaaatcattgatcgccacgacttcgatatcatctgatacttctttgattcgacggaaggccaagcgaccgatacgtccgaatccatttattcccacttttactgtcataatctattgttcctcctcttttttgatcttacaattaaaattctgctacgaaaccaggattctgtcaaagaaaaacccttaattttttatctagttctttgggaaaagaggcagaaaagatagacaaatggccttgcggtcgttacaattaaatagactttcttaaaggtgaactttggcctgcaaatggcatgaattgtattcaaattggtttattagaaggtaagaagagagaatggagggcacataacatgtccatgtttttagatcaggtaacaatcgatgtcaaagctggtaaaggcggagacgggatggttgcatttagaagagaaaaatacgttcccgatggcggaccagccggtggggatggcggccgcggtggtgatgtgattttagttgtcgacgaaggcttgcgtacgttaatggatttccgtttcaatcgtcattttaaagcacaaccaggtgaaaacggaatgagtaaagggatgcatggccgcggagcagaagatacgtatatcaaagttccccaaggaaccactgtccgcgatgcagacacaggtgctttgctaggagatctgttggagcaaggacagacgttgacgattgccaaaggcggccgtggcggtcgcggcaatatccgttttgcttcgccaaagaatccagcgccagaactagctgaaaatggcgaacctggccaagaaagaaaaattgaattggaattgaaagtactagctgatgtcggcttggttggtttcccatccgtaggaaaatctacattactttctgtcatttcttctgcaagaccgaagattggtgcctatcactttacaacgctagtccctaatctagggatggtaacgacttcagatggtcgtagttttgctgtggccgatcttcctggattgattgaaggggcatcgcaaggtgttggattaggtacacagtttttacgacacattgaacggacacgagtgattttgcacgtgatcgatatgagtgggatggaagggcgcgatccgtatgaagactatcaagcaatcaatcaagaattagcaacccataacttacgcttgcttgaacgtccgcaaattatcgtagcgaataaaatggatatgccagaatcagaagaaaatctggtgaaattcaaagagcaattagcaaaagaacaaaccgatgaattcgcagatcctttgccgattttcccaatttcaggtgtcactcgtaagggaattgatgctttactgagtgcaactgcagacttattagaagtcacaccagaattcttattgtatgatgaggaaatcgaagaagaagttgttcaatatgggttccattcggatgaaccagaatttaccattgatcgtgatccagatgctacttggatcttgagtggtgaaaagattgagaaactcttccaaatgactaactttgatcatgatgaaacagtcatgcgttttgcccgtcaattacgcgggttaggagtagacgaagcgttacgtgcgcgaggagccaaagatggcgatatcgtgcgcatcggtaattttgagtttgaatttgttgaataagattagttgagtaagcttagttgctgctttagatacagttaaagcgttagcgcctaatcctatcaataggaacaactcttgatacaactagggaatctttataaaaaagcggagttatgagatgacttcgtttttttatttgttttctttttcaaatagacaagatactggtaaaataaagaaaagaaagggagcgaaaattatggcaaaacgtgtgattgtaatgaatttcaacgcaaactcggaagcattccaagcattttctgaagtaaaacgcatgcatatggaacggaaaatcaaaggagaacaaatggctgtgatcactcatacagaatccggtgcgcaccagttcaagatcgaagattttctagactttaccggtaataacaaagcatcgactggtggaatgattgggatgctagtaggaattctgggaggaccattaggaatcatgttaggctggttcggcggtagtatgattggtgcgacacgagacgccaaagaaatccaaaatgcacaattgctgtttgaacatgtcagcacccaaattggggtaggcgacactggcttattgttgattgcagatgaggaagacaatcgtccactaaatcagttgatcatgaatcaattaggtggggaaattactcgctttgactatgatgaagtagaagcagaaattgaaacggctaaaaaagtcgaagaaaaaacgaaagcacaagcgcaagaagattggaaaaagtctcattcccaatctgaagaagaacaggaataaactataaattgcatctgaccttcgtttccgctaaaattgggggaagatgaaaggaaagaagtatatggaattagaatttttaggtaccggtgcaggcgtaccagcgaaacatcggaatgtaacaagcacagcactgcggttacttgatgaacgcaatgctgtttggttgtttgactgtggtgaaggcacacaaatgcagattttgcattctacgattcgcccacggaaaatcgaaaagatattcattactcacttacatggagatcatatttatggattgcctggattgatcagcagtcgctcctttcaagggggcgcttcaccgttagagatttatgggcccataggtattgaagaatttgtgcggaccgtgttaaaaatttctcaaacaaaattgagctacccgttagtttttcatgagatcacaaaagaaggcattctcttcaaggacaaacagtttaccgtttcttgccgtcggttggatcacggaattgaaagctttgggtatcgagttgaagaagcgagtcaccaaggagagcttcaggtagaagctttgactgcattaggaatcaaaccgggtccagtttttggtcgactgaaaaaaggcgaaatcgtcacgttggaagatggacgacaaatcaacggaagtgactatgtaggtgaagcgaaaaagggacgtaccgtcacgattttaggagatactcgcctttgtgccaattcgatcttactggctgaaaatgcagatgtactggttcacgaaagtaccttcaataaagatgaagctaaaatggctcgcgcctattttcattctacaacggtgcaggcggctgaagtagccaaacaagcgcaggtaaaacgattgcttttgacgcacattagtgcacgctatgttgggaaagatattacaaatctggcaaatgaagcaaaagctgtgtttcctaatacggtgatcgtgaaagacttcgatgtcatcgatgtcccatttgcagaaaaaggagatcaagatgttgttagaaaataaagtaattgtcgtaactggcggatctgctggcttaggggaacaaatctgttatgaagcagcgcgtcgcggtgcgatcgtggtgatttgtgcccgtagaagtcagttgatcaacaaagtcaaagaacattgtatgacattaagtggcaaaccagcttatgcctttcaattggatattgcagaccctgaaagtgtcgaaaatgtcattgcttcgattcgtgaaaaggtcggaaaagtggacattcttgtcaacaatgctggttttggtatttttcaagaatttacagaaatgaaaccagaaacgatccgcaatatgtttgaagtgaacgtattagggatgatggtcttaacacagcaaattgctttagaaatggtcgatcagcgctctggtcatatcatcaatgtggcatcgatggctgggaaaattgctacaccaaaaactgcagtgtattcggcaaccaaatttgctgtattaggtttttcaaatgcgttgcgtttggagttgaaacctttcggcattcatgtgacaactgtcaatccggggcctatcgaaacagccttctttgaccaagcagatcctagtggcaattatttagcttctttagggacatttgttcttgaaccaacaaaactggcaaagaccatcgttaaagcgatgattcatccaaaacgagagatcaatcgcccacaagtgatgggagtagctgcaaaattctacacactattcccagctattggggactacttggctggaagtctattcaataaaaaataggagttgtttttgatgaaaaatcaatggcgagtaatcgtaggtattttgttggttttagtgatcgtcctttttgcggtcgccaataatatgactgttccaatcaattttggctttactagcatcaaagcgcctctgatcttgattatcattggggcggctttgttgggggcactgattatcttactagtgtcaactagtacgatgttccaacaaaagaaagaattaaaaagattacggaaagaattggctgactttcaacaaaataatgaagaaaaatttcaagaacagcgtgaggtattagaacgggaatatgcaaacaagcaagcagacctcgccttgagggaacaacaaattgctgaagcagaagcaaaaactgcggcagttgtgcctggtgaaccaccaattatagaaaatcgtcaagatacgtttccagagtaatggtaagcttgcactcttgtttttcaaaagagggttttgggactccaaccagaacggtaaatctctgaagtgaggcgcaagattggctcaccactcttttgcaacaaatgagcgaaataaaaacgacatccttcggtggtctttcgataaacgaccgaaggatgtcgtttttattgtactagaaataggatagaagctggtagtgcttttttggtcaacgcttttcttttctccaaaatatttgctataattaccaagttaggagtgattgtgtgaaacgcgcgaactttcattggctgagaccacaaaaaagtgaattatcagctaatttcgaggaaatgatccaagcaagaggtttgtcaccattaataggtcaattattatggcagcggaatattcgaacagcagcagacttgcaaagttttttagaaccggatttgcagggacttcatgatccatttttgttttatgatatggaaaaagccgtcgatagaattcagacagcgatcatgaatgaagagcgtattctgatttatggagactacgatgctgatggtattacgagcacgactgtcttaaaagaagcgctggaattattgggtgcggatgttgaattttatctgcccaatcgctttaccgatggctacgggcccaatctttccgtttatcaagataaaatcgcagctggtgtgcaattgattataactgttgataatggtgtatctggtcatgaggcattggcttatgccaaagaagcacaggtagatgttatcgttacagatcaccatgagttgccaccagaattacccgatgcgtatgccatcattcatcctcgccatccattaggaaattaccctttttcagatttggcgggtgtcggagtcgcattcaaagtcgctactgcgttattagaagaagtgccagtcgaattattagatctcgtggcaattggtacgatcgccgacatggtgtcgctcactggtgagaatcgcattctggtcactaacggattaaaaatgatccagcaaaccgaacgtgcggggctctcggcactgatcgaagtgagtggtctgaagaaacgggcaatcaatgaaacggatattggttttgccatcggacctcgtttgaatgcgattggacgcttggaagatgccaatcctgcggtaacacttatgtcgacatttgatccagaagaagcccaattgttagccaatcaattagatacgatcaatcttcaaagaaagcaatatgtggaaacgattttgaaagaagctcagaatatgctttccgattcaaatcaagtccatttaattgtgggagatgattggcatgaaggtgtcttagggatcgttgctggacgattgatgcaacagactggcagaccggtccttgttttaaccaaaaaaagcaacggtattgctaaaggttctgggcgcagtgttgcagcattaaatctatttgacatgctctctggaatgcgtgaaatgtttaccagctttggtggacaccatgcggcagtagggctcagtgtgcccattgatcacctttcgatgctccaagaacgtatgaatcaatacgtggtcgataatcggatcgacctttctagcgggattccgttaccgattgatgaagaattgtctttagcagaaattacgacaaattttatcgagtcgctgaaaattttagctccctttggtacagacaacccaatcccaaagtttttgattacgaatatttctgctgataatggccgacaaattggtacagagaatcagcatttaaaagtcagtcttacagatggagaaaatggtcaattagatgtgatcggttttggttttggatcacagctagtagaatttgagagtgaaggattggccgttgtggggcaattatctgtcaatgaatggaacggcaagaagaaaccacagctgatgttggaagattttgaagtcaacggcatacagctgttcgacttgcgttcaaagaaaaatcggcaagggttgatccttgatgcccaaacattagggattgctttttcggataaattgccttcagagatagaacgattttgtccgaacgttcatgtttatcaaacgttagacgatttgacagctttttttggttcaggaaattatacgcaactcgcttttctagactgtcctagcgagaaagagcttttgagaaaaatcattcaagaaatacctgtcaatcgtatctatttgattttagtatccacagaggatgcttatctggatggtgtcgggactagggaacaatacggccgtttgtttcaactgatcaatcagcagaatgggattgatattcgctataaactgccaatggtagctaactacttgcagattccagaaaaattattaatttttatgattcaagtgttttttgatttgaaatttgttacaataaaagatggcgttttgaaaaaagtccctgatccagagaataagccgcttactgagagtgtgttgtatcaacagcgacttgcaaaaatcaaaacagaagaagatttactaatgagtgatttatcaacgattcgcaaatggttgatatcttaggaggaaaaaacatgaatttaaaagactatattgccagcattccggattatccgcaagaaggaattgtctttcgcgacatctctccattgatggctgatggagaagcttatcgttatgcaacacagcaaatcgtcgagtacgctcaggaaaaagggatcgacatggtggttggacctgaagctcgtgggtttattgttggttgtcccgtggcgtatcaactgggtgttggttttgcgccagtacgtaaaaaaggcaagctacctcgaaaaacgattgaagcaacataccagaaagaatatggcgtggatattttgacgttacacgaagatgcgattaaacctggccaacgggtattgatttgtgatgatttacttgcaaccggcggcacgattaaagcaacgatcgaacttgtggaaaaattaggcggcatcgtagttggctgtgcttttctgatcgagttgatggacttgcaaggcagagacaaaatcactggatacgaaattaaaacattgatggaatattaatcgaaaaaagccagatcaattttgatctggcttttttttgtttgtttggcagcaacactgaaataatcgacctactgttcgtaatgataaaaatcatggtcgtggtaataagtttggtttctctttcgttctgcttggcggaatttcttttcatcccatagcatgaaccacagcatcatcaaagggcaaaaaatcagaactgcactgagtacgccaaaataaccaataatgatccctgttaacaacacccacaaaataaaaccaaatcgacgaactgctttcattattttcactccttataaaaatgcgaacttatgtttgtaaaactattatacgaatgtttgttcggtttgtaaagaggaaataaaaaaaatcttcgaaggttcgaagatttaaggaatcgattaaagtaagtgacggtagagaccaacgactaagcctaaaatcgttacatctggcaagatgataggttctaggtaatcattttccggttgcaaacgaatgtgatcctgttctttgaaaaatctcttacaggtggcttcatcttcatccgtcattgcaatgacaatgtccccgttttgagcactttgctgtttgcgaacgatgacttgatcaccgtctaagattccagcgttgatcatactttcaccgcgaatcgtcaacatgaacaaactgccggtgctatttgctaaatcaggcggtatcgggaaaaaatcggaggcgtcttctacagctaagatcggttcaccagccgtaacgactcctagcattgggatcgagtttggctgcacatcgattttttctaatccggaggaagtcaattcaatcgctcttggttttgttgggtcgcgtaaaatcaagccttttttttcaagcctggataaatgtccgtggacggtagaagtagaggatagctgaacggcttcgccaatttcgcgaacagtcggcggatagcctttttcagtgactcgtgtatgaataaacttaagaatctcgatttgtcgattttctgttcgttttgccaaaactgacaccttctttcatttgatagtcttagtgtaccataggagaaacgacaattcaaacaaatgttcgctttttgttgctattgtttttttgtcaggttttgtataagataaagtagtgaaaaggaggtgtcgaaatgttatccaaagaaaaattagcccgcattaatgagctagccaaaaagaaaaaagtgcaaggtctatctgctgatgaaacgatcgaacagcaaaagcttcgcgaagaatatttacaagcttttcgtggaggaatgcgacaccacattgaaggaatgaaaatcgtcgatcctgaaggacaagatgtcactccagacaaattaaaagaaattcaaaagaaaaaaggattgcatggcagataaagatgaattccttttcattcctattgaaatcctgaaagaaatcccgtataatatgagatgtaataaaggtaaaaaaaacctaaattaggaggaattaccattgtttgataaaatcgatcaattaggtgtcaacacccttcgtacattgagtatcgaagccgtacaaaaagcaaattcaggtcatcccggtctgccaatgggggcagcgccaatggcgtatgccttgtggaccaagcatttgaaagttaatccgaccacttctagaaactggatcgaccgcgaccggttcgtcttgtctgctggacatggttctgctttgctttacagcttactgcatgtttcagggtatcaagtaaccacggaagacttgaaaaatttccgtcagtggggcagccgcacaccaggacacccagaagttgggcatacggatggtgtggaagcaacgactggtccattaggacaaggaatcgcaatggccgtcgggatggcgatggcggaaaaacatctagcggcgacatacaaccgggatgaatacaatgtgatcgaccactatacgtatgcattatgtggcgacggcgacttgatggaaggtgtgtctcaagaggcagcttcaatggctggtcatatgaagctggacaaattgatcgttttatatgattccaatgatatctcattagatggacctacttcaaaagcattcacagaaaacgttggtgcccgttttgaagcttacggttggcaacatttgttggtcaaagacggcaatgacttagaggcaatctcacaagccattgaagcagctaaagctgaaacagagaaaccgacattgatcgaaatcaaaacagtcatcggttacggtgccccaaatcaaggaacctctgctgtccatggtgctccattaggtgcggaaggtatttcagccgctaaagcaatctatggctgggagtatcctgaattcaccgtgccagaagaagtagcggctcgtttcaaagaaacgatgatcgatgaaggccaaaaagccgaagcggagtggaacgagaaattcgctgcttacaaagcggcttatccagaattagctgcgcagttcgaacaagcagtggctggcgaactaccagcagattgggatgcagaactgccaacttatgaagtaggcagctcacaagcgagtcgtgtttccagtaaagaaatgatccaagctctttcaaaagctatcccaagcctatggggaggatcggccgatctatccggatccaataatacgatggtcgcagcggaaaaagattttgaacctggtcaatatgaaggccgcaacatttggttcggtgtgcgggagtttgcgatggccgcagccatgaacgggatccaacttcatggcggtacacgcgtgtatggcgggacattcttcgtctttgttgattacttgcgtccagcagttcgcttgtcggctctccaacatgcgccagttatctatgttctgacccatgattctgtggctgttggtgaagacggaccgacccacgaaccaattgaacaattggcgagtgtacgctgcatgccaaacgtgcaagtgatccgaccagcagatggcaacgaaactcgggcagcttggaagatcgccttgcaaacgacgaataaaccaacggtcttagtgttgagccgtcaaaacctgccagtgttagcagggacgctaagtggtgtcgaagaaaacgtggctaaaggtggctatgtcctttcaaaacaaaccggtgagacaccagaaggcatcttgatcgctactggttcagaagtgaatctagcggtagaagcgcaagccaaactcgcagaagctggagtggatgtgtctgtcgtatcactgccaagctttgatttgtttgaagcacagtcagaagagtacaaggagagtgtcttgccgaaagccgtgaaaaaacgggttgccatcgaagcagcttccccatttggttgggatcgttacctaggctgcaaaggcaaagtcatcgccattgatcattttggcgcttctgctccaggaaacaaagtattggaagagttcggctttacagtcgaaaatgtggttgccactttccaatcgatcaaataagcgtaagaaacaagcgaaatcgcagctgatttcgcttgtttttttaaagtcttttcgtttttaggtagaacaagatgtttttgcgaaaagacttttaaaaaactattgagttgcttaagttgcacagaaaaaattttttccgtataatgtctatattgttgaatagtattgggacgatggaggaaaagaatgaaaaattatcaaacccgcagtgaaagacatatccaccaacaaaaagcagtgatgccacgaccaagtaaacgagcagtggtttcttttattggggctggattagcattgtcaccagcggtggtcacgctacttcccgaacaggtccaagcaagtgaatatcagaccactagtcaaggaatcgctagttttatcgaacagattggttggtcagcacaagacgttgcggccaataatgatctttatgcatcggtgatgatcgcgcaagccattttggaaagtggctatggctcatctacattatccaatgcgccttactacaatctttttggggtcaaaggatcatataacgggcaatctgtctatttgcctacagatgagtatatcaatggacaatgggtcgtaatgaatgaaccattccgccaatataattcctactgggagtcttttcaagatcacgccaacgttttaagaagtacaagcttcacttcaggtaaagcacattatagtggggtctggaaaagtcaaacgacttctttttacgatgcgaccagctatctgacaggacgctatgccactgatccaggttacgcacaaaaattaaactggctgattgaaacgtatcaactaactcgttttgatacaccaagtactggtgccacaacgacttctgtaacgacaacgacaacgcaatccacatcgacgacaacaacgacacaaagtacgggacaaagttatgtcgtagcatctggcgacagtctttgggatattgcttcacgttttggaacaacggtggatcaaatcatggctgccaatggattaagcagtgacttgatcgtcgtaggacaggaattgatcgtttgattttcgctatttattagctaaacgccaaatgaaatttcacaaaaacttttgtttttgttctcttttagtaactaaaagaagcaaagcaaaagtttttttctttgtgaaaaaaacataaatatttggaaaacgctaactttttgttcgcaagtctgccgttttttgggtagaataggaatatgaactggagggattgcaaatgacaaagatttatcaatctgttaccgagctagttgggcatacgcccatcgtcaaattaaacaaggtggttggagaggattccgctgatgtctacgttaaacttgagttttataatccagggagcagcgtgaaggaccggatcgctttggctatgatcgaaaaagccgaaaaagacggctctttgaaagcaggcaatacgatcgtggaaccaacttccggtaatactgggatcggcttggcgatgatcggtgcagcgaaagggtaccgagtggtgatcgtgatgcctgagaccatgagtatcgaacggcgcaagctgatgcaagcctatggtgctgaattgattttgacaccaggctcagaaggaatcacaggttcaatcaataaagccaaggaattggctgaacaagagggctattttatgccgctgcaatttgaaaatccggcaaatcccgagattcacgagaaaacaactgggaaagaaatagagaatgcctttgaatcaaaaggattagatgcctttgtcgctggtatcggtacaggcggcacgatcactggtgcgggtcgagaattaaaacgagtgtatccagacttaaaaatctatggcgttgaaccggcagaatcggctatcttagaaggcggacaacctggtcctcacaaaatccaaggaattggaaccggctttgtacctaaagttcttgatacagagatctttgatcaagcaattgccgtatcaagtgaagatgcgatggcaacagcgagagaagtcggccgtaaagagggcttgctcgtaggtatttcttctggagcagcgatccatgcagcactcaaagttgccaaagaactgggaaaaggcaaaaaagtcttagcgatcgtcccggacaatggagaacgctatctatcgactgctttatatcaagtggaagaataacaaggaaagcgggcattggcagaatgcctgctttttctccccttttcttaaggactgtggaatttttcgtgtttgttttgtggttgattaagaatttttagagaaagctgtttgaatttttaccatctacatagtatgatattacagataagagaattggaggaactcctgtgaacacgatatatgatgaggcaatcaaacaattaaaacaagaaaatatccgtatcactccacaaagggttgcgatacttgagtttttggctagccacgcatcacatcctaccgcagaagaaatttaccgagcgatcgaagtccactttcccggtattagtgtagcgacagtctacaataatctgcgactgtttacggagatcggttttgtgaaagaaatgaactacggcgatgcatccagtcgctttgactttaagacagagccgcattatcatgcaatttgtcaacgttgcggcaagatttctgatttttactatcctggattggaagatgtcgaaatggccgcttcccaactgaccggatataaaatccaaagccatcgcttagaagtatatggattgtgtccagagtgtaaaggagaagaggaatgaaaattatttcaacggataaagcaccgcaagcaattggtccttatgtacaagcacggattgctaatggtttcttgtttgcttccggacaagtgccgttagatcctgttacaggagaagttgtgggagcaactatcgaagttcagacacagcaagttctcaaaaatatcgaggcaattttaactgccgccggtattacaccagatgaaatcgtcaaaacaacatgtttcttaaaaaacatggatgattttgttccattcaataatacatacagcacactttttcatgaacatttgcctgcacgttcagcagttgaagtggcccgtttaccaaaggatgtattggtggaagtagagatcattgctgtggtggcacaataaaggagtcaatgggacggtcgtatatatgcgcagtcccatttttgttgagaatggattttattcttgatgatgccaaaataaaattgaaaatggtttttatgtaacgatgggaaaagaggacaataagatgatttctttacaagaatatttagcccaggggcaaacaactgtctccaatctgcttttggaaaactatcatagccttggtttaaccaatgatgaatttgtattatggcttcagttgtatcgttaccacgaacaaggcaatgattttccagatttagcgatgattgctaaagggatgggaagtgagcaaaaagaaatctataaatggttgaatgagctattgaataaacagatcatcgccatcgaatccaagaaagattcagcagggaagatggtggattactatgagttttctggaatctatgaacgactggaagtttgtttgcggcaaaaaaatcagcaggaggaaaagcagagctatgattcaaaagtacgttcgctttatcaaatgtttgagtccgaatttggccgtccgctttcagcaatcgaataccagcgaatatcacaatggctggaagaagataaataccagccggatttgattcaatttgcgttacgtgaggcggttttgaatcaagcctacagtttgaattatattgatcgcattttactttcttgggaacggaaaaatattacctcgaaagaacaagtagaagaagaacaaaaacgccgtaaaaaacagtttatgcagaaagaaaatttggaacaaacgaatggaccggttcctaagattcctatgcataattggttagaaggggaataaaggagagttgccatgatcagtaaagcaaaaactatgatcgcattggaacaaatgtaccaaatgttccccgacgctcacggagaactgatttccaaaaatccgtttgaactgttgattgctgtgattttaagtgctcaggctacggatgtgtcggtcaataaagtgacccccacactatttgctgcctatccgacacctgaggccttggcagcagctcctgttgaggaaatcattgagaaaatacggacgatcggtctttatcgcaacaaagcaaaaaatatcaaggcttgtgcgtcccagcttatcgaacgattcaatggccaagtacctagaacccgcgaggaattagtgtcattaccgggggtcggaagaaaaacagccaacgttgttttgggcgatgcgtttggtattccggcaatcgctgtggatacccacgtcgaacgagtaaccaagcgcttacggatttgccgattagatgcaaatgtcttagaagtagaacaaacattgatgaaaaaagtgccagaagatctttgggtcaaaacacatcacacactgattttctttggacgataccattgcacagctagagcgccaaaatgtgaagtttgcccattattgacaatgtgccaagaaggacaactgcggatgcgcgcaaaaaaagttcagccacctcaatgagaggcggctgaacttttttttattcaggatttgtttcatttgtccctggagtagtcgacgaagatgatggcgtcgaacttgactccgaagaagacgatggtgtgctttcactttctgacggtggcggtgtagattgtgagctttcagaagaagattcaactggtggaatcgattcttccgttgaactgctagattcaacgatttcagaactgctttctggtgttgattcaggaagcgaagaagagctgatcgttgatcttgtgctagaacttggttgctggtaagtccctttgatgtaaagctcattgccgatccgggtcaaatctgcgggcattttccagtcgcggttctcaacagaggctgagacaaattgcatcaattcccgataaacatctgaggcaacatgagtactgctgtctgtgatcggcgtcattttatcattataccctgtccaaacagctaaagaaaaggatggggtataacctgcaaacgtgatatccgggtaagcaccgtttgacgtatccaattgagccaattgattgtcatcatagttggaagtcccggttttcccagcttggtaaagtccatcgatttgggcattggttcctgttccgacagaaatcacgtctttcagaatatcggtgaccatataggctgtcgtatcatccatcgctttttgaccttccactttgaaggagtcttcatcaactgttccatcttgcgaaacgatcttattgacatattgcggctcgtaataggttccgccatttgaaaaggcagcataagcagcagccattttcaagctagagatcccatacttggtgccatcgatttctgatgtgttgctggaaattgcattggactgttcaatgtttttgtattcaatacctaggcctttcaagaaggaagaaatattgtcagcacctacttcttcaaaaagctttgctgctggaacatttctcgattgagccagtgctgtccgcaaagtgatatttcccatatattgtcgatcccagttgtagattggtgtgttcgtccccacgtaattatagggttcgtccaaaatcatgcggcctgttgaattttgtaaaaattggaaggctggaccatagtctgtcagtggtttaacggttgagccaaagtcacgagtgacgttgactgctaaattattacctaagacaacatcgtcttccacatgacgagcaccgatttgcgcgacaactttaccactattaacatctaccagagtagcggctacttgcattttatcatctgggaaattgatgtattcgtcactattaacgatgtcatacaatcgtttttgggtattgacatcaagattcgtatagatgtccaatccatccgtatagacatctttgccggtttttgcttttacttcatcaatcacttctttaaagtaattgtcataatatttccattcgttatttcgttgcggatttttttgcaatccttctgaaatatcttcggctttggctgcttcatattcgtctttagtgattttttcattctcatacatggttaacagaacaagatctcgtcgctgtttagctttgtctgggtgagcatatggatcataagcagaaggggcgtttggtaatccagcgattaatgctgtttgagccaaatctagttgatccaatgtcttgttatagaacttcatggcagctgtctgcatcccatagacaccgttagacatgtacactttattgatatagtaggtcaagatttcttgtttggattttgtttgttccagtctgacggccatccaagcttcttgcgcttttcttcgcaacgtctgatcttctgcactagtagagaagaaggatagtttgatcaattgctgtgttagggtactcccaccttgcatgccaccagtcgtcacgttcgacaatgccgatccaatgatacggatagggtctactccaatatgttgatagaaacgacgatcctctacagatacaatcgcatcttccaattgctgcggaatttcattcgcagtgattttttcacgggtctcgctaccaaaatcgaggatcagatctccgtttgaggcgtagaacctggaggaagcagcagaatcgagctgtttctcatctaatggtggtgcatctttagcgtaccaccaaaaaagtcccatccctgataagagaccgagacatcctaaaaagaagagccccataaaggtacgaagtaaaatactgccaatcgttcgttttcctttcggctttttttgtttggggcctttatatgcagccgccgctttcttagaatcatgtcgagaagctctcgattgcgattctttcgccatactaatcattctccttcattgacaaaaattgatctactgcttttaaataaggaatacgcggagcgattcctgggatgatctcaatgccgtttttctctatataggcaagaggcagcgattttttacctgttgttttttgttgatgccactctgtgatcaagttgctgctcgtcaaaaaaaagcagcgttgcaagcttgagaaccataacaagacaaagcagactccttgctgcgtcagacagttttccatatgctgaatctgatgctcatgaaaatttttgaaggggaaagaggttttgttctgtgtctctttggcttcaaaatccaagtaatatccgcgataaacaccattatagtccgtggtagaggcttctcggaagtaagcttctttaatcacagctgcactgcggcggggataatccaccttaacgatctgaacaggtgtaggttttttatgaatgactgctgcttgacgattcaaataataggcattgctttgattaattgcttcttcaaaacgcattccgcggttcgcgaaagtttttggccgagctattttttcttgcaatttttgttttttaccgccatcataagcagaagactgaccgttagggtatcgaatgaccatgttattcacactcctaggcatcattataccaaaaagacgtttggaaagaaaagagatgactgcttaaacaatgaaaaccttatattttaccggctaccgcagctttgaacttggtgtatttcaagaaaaagatcccaaaatcaaaattattaagaaagtaataaaaatgtctttgctttcttacattgaacaaggactggaatgggtgctgatcagtggcaatctaggagcagaaatatggtgtgcagaagtggtggagcttttgcaaaaagactatccagaaatcaaactagggatcatttatccgtttcaaggatttggtgaaaactggaatgaagcgaaccagcaaatgttgcaacgagtgcaaatgagcgctgattatgtgaatgccactagccatcaaccctacaaagaaccaagccaattaagaaatcatacccagtttctattggaacacacagatggtgcgttgctgctttatgatgaagaattccctggaaaaaccagcttttttttgaaagatgcgaagaaatatcgggaggatcatccttacgagatcgatcaaattacaatggatgatctgcaaaacgcaacatttgatagtaatttactttgatttctgagagttttttgatagaatggtctagaaagtgaaaatcatttggaaaaatcaatgaggtgtaaataatggcaaatctaatttttagtcccaaggatattcttcaacaagaatttaaaacaaaaatgcgcggctatgatccagtggaagtcgatgaatttttagacaatatcatcaaagactacgagagctacaacaaagagattttagcattgcaagaagaaaacgatcgtttgaatgcaaaaatcgatcaactttctaagaaccaagcgattgcatcacgggtccaacaagaagcgccaaaaagtcaaacagtgacaaattttgatattttgaaacgtttgtctaatttggaaaaagaagtttttggcaaaaaattggatcaagaagaaccagttacacgttcctcttcatacaacagcaactacacaaatgctgattttgaagacgataacgaaaaaacacgtcaattctaatcaatttgattgctgtggttttcgggtaattgcggcataactttgattatgctgaggaaagtccatgctcgcacaagctgagatgcttgtagtgatcgtgcctagcgaaacaataagctagggtacttgaaagagtaacggcaggaaaaatggctaaggcgcgagctatgccaaagtatccttgaaagtgccacagtgacgaagcaagacgggaaaccgtcttggtggaacgcggtaaacccctcgagcgagcaacccaaacaatggtaggggcgctttttgcacggaaatgaacggagcaaaaaggcaagtaattgcagatagataattacccaacgttttcttctccctgaggaagacgtggacagaacatggcttatagaaaatcacagcagatcagggaatccttccagcaacggaaggtttttttatatcaagaaggagaaatctatgacagaaaaagtatttgattgtgtcgcaaccgctgctagtgggttagaagcgctagttggtaaggagttgcgagatttaggcattgaatgccaagtagaaaatggacgggctcgtttcaaaggaacgttggagaccattgcaaccgccaatctctggttacgcacagctgaccgcattaagattgtggtgggagaatttgatgtatacacctttgatgaattatttgagcaagtcaaagcattaccttgggaagactttctgccgctagacgcagagtttcctgtggcaggtaaatcgatcaaatcgaagttattcagtgtgcctgattgtcaggcaatcacaaaaaaagcgatcgttaatcgattacgggaagtttatcatcgccctgcaagtgttcctttaactgaaagtggtgctttctttcagttggaagttgctttgttgaaagatcatgccatgatcacactcgatacgacaggaccgagtttgttcaaacgtggctatcgactagaaaaagggagcgcacccttaaaagaaaatatggctgcagcattagtcatgttgaccaactggcgcaaagaccgaccgtttgttgatcctgtatgcggttccggtacactgtgcatcgaagcagcactgatcggacataatattgcccctggattcaatcgctcctttgtctgtgagacatgggattgggttccagctgaagtatttgagactgtaagagctcaggcagacgaagcagccgattacgatagacaactggacattatgggctcagatatcaatggacggatgatcgaaatcgccaaagcaaacgcggaagagattggtctaggtgattccatcaccttcaaacaacaagcagtcaaagattttaaaacagacaaagaatacggcgtgatcgttgccaacccaccatatggggaacgtttaggagaagaagagacggtacagcgcttgtaccgtgaaatgggcgaagtttttcggccattaaaaacttggagcaaatacattttgaccagtgaccttacatttgagacccactatggtgaaaaagcaaccaagaagcgcaaactatataatggtgcgttgcgtacggatttcttccagtattggggcagtcgcccaccgcgtaaaaaggagacggttgaatgaaagaacaagaatttctaaaagaattaaaagagctcgatttgctgtcacaagcaatgggaatccttggttgggatactcagacgggaatgcctgaaaaggccagcgaatatcgcagtgaagttgacagctacttgtatggcttgtatttcgaaaagaaagtcggaccaacgatccaagaagccattacttattttggtcagcaccctgatgaattatctgaagttggtcaagcagcttatcagctggtgaaagaagaatatgagctgcaaaaaaatgttcctaatgaattagcgatcgcagcttctgctgctacttctagagctcatactgcttggacgcaagcccgcaaagcgaaagatttctctttattcaaggaagcattagctgagaatatccatttgacaaaagagctgatcccttattggaaaaaagaggaacggacaaattatgatgttcttttgaatcaatatgaaccgaacatgaccgttgaaatcttggataatgtgttttcacaagttcgtgatggaatcatggatattcgtcgccagttagaaaaaggtactccaccagatacaacgatcttatctcgtgaaatgacagaggcgcaacagcggaaattcatctcgaaagtcatcacagacttagggtatgatttttctcgcgggcggttggacaatacggtgcatccttttgcgaccggcattaaccacaatgatgttcgcttgacgactcgttggaatgaagaagatttttcgatgggaatattcggcgtgattcatgaagcaggccacggcatgtatgaacaaaacattgatgaaaaatttgaaggaacgccggtccacgaaggagcatccatgggaatccatgaatcgcaatctttattcaatgagatcattatcggtagcaatcgtaatttttgggagaaacaatacccttattttcaagagtgtgcagaaggaactttcgatgatgtttcctttgagactttctacaatgcattaaaatttacccaagcaagtttgattcggatcgaagcagatagcctgacgtatgttttgcatatcattatccgttacgagattgagaagatgattttcaatgaagaagtgaatgtggaagatctgccaactatttggaatgataaatatgaagaatacttaggcgtacgtccgcaaaatgatttagaaggtatcttgcaagacgttcattggtcagggtcaagttttggctatttcccatcatacgcgttaggatacatgtatgcggcacagctttttcatgcaatggaaaaagagatcgatgtcgatgctgtattggcttctgatgattattcagagatccgccaatggttgaccacgcacattcatcaatacggggcttctaaaaaaccaaatcaattgattctggatgcgacaggagaactgttaaatccgcaatatttattggattatctgcggaaggtttatttttctgtttatcaaatccgctaatgagcaagcctttcgttcactcgaaaggcttcttctcatctttaaaaaaacgcacggcaaactaggtagctagacgatagtctttattgactttaggttctgatactttgatggaatcggacgattgaatcagaatgctagcaatagaaacaagataaaaaagacaggagtttcaaaaaatggctgatatagcaccaatttatgaatatgccaaattgattttgggaactgatcacacagggcatggctttgatcatgtcaagagagtagccgcaatggccaaacagatcattgccgaagatcaactgcaagtagatgattatgttgtggaagcagcggcatttttacacgataccatcgatgataaggtggtgaaagatgtggtgaaagccaaagaagaagtgcagcaatgccttctcgctgctggagccacagcagaacaaatcagtcatatatttacaatcattgagaatctctctttctcaaaagagttactggcaggggcacaagtctcctctttagaaggacaaatcgtgaaagatgcggatcgcttagatgcattaggcgcaattggtattttgcgtactagttactttggcggtgcacatcagcatccgatccatgaatcagagcgagcgccgaaaacgttcacaaaccacgctgactaccgaaaagggaccaccgtgatcaatcatttctatgaaaagttgtttttattgcctgaaaaaatgcacacgcactttggtaaacaagaagcactgcggcgtaaagacgttatgacaacctttttaactgaattttatagagaatgggatgtttagtaatttttaatcttcagttcgattcctttgtgtttcctctgtatttatctataattataaataaggggagagatggatatgtattacaaacaagcgctgaaaccgaatgaattattacctgcactttctgattctggggaatgtttttttatcattcgagcagcattacccatccggaattatcaagttgccatttaccggtacgatgatgagtattttttattgcaagatgaacgtttatttaatcagatctctagtatttccagggaacggcaaggagatgaagaacagattctgccattcattgaagaagcattagaagacaatcactattttctagtggaaaaagagtttatccgcttggatttattgacgctacaaaaaatgacaaccattcaatcgtttgaaatattgttttacgaattctttgatttttgaggtgatgggtgatgaaaaaaacggaatacctaaccattgaggatgcagcactcgctgatttatttcttgatctgggtgataagtacagcaacctcgaattgattgacgaagaaaaagatttggatgtggtcgttttgtcaaatagcgactggcaatatcttttggaacaactggatgatgaagtcaaggagcaatttcttgcacagaccgagactgattttctagacgaggagtaagaatagaggggcaaatgcccaatgaatgtatgtaggttaaagaaaaacagaagaacacaaaacaaaaaaatatccgaacgatagtcgatgaagaatgcgatgcgcttaacttaagtccgcatgcatgtaagtacgcttgatcattcagctatcgttcggataattgttttgtttgacggattcatttgtttttcagagcgcctgtcagtcaacatttgaataaagtgaaactgtatctttttcatttggattggagacgtacttttttgattttagcataaccccgaaaaatattgcggatcactaacaagagaccgatcagcaacggaatagctaataagtagagggaatagccatggacctgctctaccgcagcagcattggttttatttacttctgtcagcgcctgttggatcacttggaaactgaatacactcataaatccagcaatgataaagagtacaaaccctaaataaggaatatgagaagaacggcgaaaaagcgcaaagccgatatagagcaataaaagaaaaaatggcacaccaaaagcaaaataaggattcaacatgttttttaacctccttttatttatcatactccaaaatttacgttttgggaattacagtgtaagattaaaaggaaatagatttttaggaggatgttatgtcagcttatcttatgccaatcaaggttgcattactgttatttccattcttggcacttgcaatctcgtcgatattttttgtgcgccaataccgtaaatttggccgatttattttttcacgagcaattgtactttattcatttgttttttatctgctttgtgcctatttcttggtcattttgccgttgccgagtattgaagaagtcgctcaaatgaccggtcccaaaatggagtggcagttaggtgcttcctggcagcattttttgcagcaaacggtgttacaaatcaatgatcccactacgtatcttccggctttgaagcaaaacgtagtcttagagccattattcaatctttttttgacactgccttttggtgtctatatgcgctactactttaaattgtcttttccgaagacgattgtggcaacctttggcttatcactgttctttgaattgactcagttaactggattatactttatttatccgcgcccttatcggttgtttgacgtcaatgatttatttgtcaatacccttggcgggaccattggctttttggtgacgccattgttcaccttcctgttgcctacccgtgaagagatggatgccgaatcttatgccaaagataatcgagtgacgtttactcgccgatttgttgcttggctgatcgattggggaatattgaatttattcgcttggatgcttatgattctgttaagagtgactgtgaataaagaaatcgatgactttacgaatgattattggtattttttactagaagtagttctttactttattcttttgaattatattctcaatggacaaacgctaggaaaaaaacttgttcgcattcgagtgatggaggaaaatcattcccgtgtcagtttcagagcaatttttaagcgttatggattgctctatctgatctatgttagtgcgacacgcatcaatgtgttgtttacgccttttattcaatctactaatcaaatgctcgtcctagtgagtttgttggttgtgttgatttttggtttgatccaacttggattttattgcaacatcctttgggcagcattcaaaaaacaaccgcgattcttttacgaaaaaagaacggctacttatgtagtaagcacgatccagcgaaacaaggttaggaattgagctggaaatatgctataatccaaaagatgtcaatagaaagaaggtgtttgaatgtcttttgagtcatttaaatttcaaccatttatttacgaagcgttagcggagaagaaatttacttcaccaacagaagttcaagaaaaattaatccctgtgatccaaaaaggtcgcagtgtcgtgggacaatcccaaactggaagtgggaagacgcatacatttttgcttcctttgatggatcaaatcgatccgcaaaaagatgaagtgcaagtcgtgatcactgcaccgagtcgtgaattagccacgcagatttatcaagcggcaaaacaactagcagaatttcagcaaccagagattcgtgtgaccaactttgtaggcggcacggataaacaacgacaaatggaccgcttgcaaaaccagcagccgcagcttgttatcgggacaccgggacgaattctagatatgatcaatgaacaagcactggctgtgcatacggcacgagcctttgtcattgatgaagcagatatgacattagatatgggctttttggaagaagtggaccaaattgctagtcgattgccggaaaaactgcaaatgttagttttctctgcaacgattccagaaaagctgcgtccatttttgaaaaaatatctcgaaaatccattgatcgaagaaattcgtccgaaagcagtcatctctgaatccattgaaaattggttgatctcaactaaaggaaaagataagaatcaattggtttatcaactactaacgacgggacatccttatttggcgattgtttttgccaataccaaatcccgagtggatgaattaaccgactatctgaaagaaaaagggctgaaagtagccaagatccatggcgatatcacaccgcgagaacgcaaacgtgtgatgcgtcaggttcaaaatttagagtatcaatatgtagtcgcaactgatttagctgctcgcgggattgacatcgagggagtttcgcatgtaatcaatgctgagattccggcggatttggatttctttattcatcgtgtgggacgtactggacgtaatcagttagctggaacagcgatcactttgtatgatcctagtgacgaacaagccattcaagcaatcgaagatttaggtgtaaaattccaaccaaaagaaatcaaaaatggggagatcgttgcaacatatgatcggaatcgtcgacaaaaacgtgaaaaatcaagagacgaattagacccaacattgattgggttggtcaagaagaaaaagaaaaaaatcaagcctggctacaagaagaaaattcagtgggctgttgataagaaaaacaaagagaaacgaaagatcgaacgtcgtcagtcgaatcgctctgctcgcaagaataaaaaaaattccagtatctaatttaaggaacacccatcggccaggcaatggctattgggtgttccttcgttttagcaaagatttttttccatttttacacagaggattccatcttcttcaaaaggaggagagaggatctcatagccgcatttttgataaaagccgactgctgcaatttcagaagacaaaaccgaccagcaaaagccattggtgatcgctttttgctcataggccgctaacaactgccgtcctatcccttgctttcgatagtttttagccacgcaaaagcgatcgggctggatcgtttgcgaatccaacgattgatagcgaatagtggcaattggtacttggccttctgccagtagaaaataatggcagaactgatctttttgatcaaattctaattcaggagcgattccttgttcgtcgacaaagacagatcttctaagtgcaaaaacagcctgctgaatccagtcctcccgcccaaaataaagctgcatcatttttcctcccaattcatggtatactcaatctatattgattgtagcagatgaaaggggaaagctcgtggattttttcgaagcattgcaatggacgaattggaaaaatttgactgctgaagtcaaaagccaagtgtttcagcaagtagtcatgtactttgtcagcccattgaaagaaattacagatgttcattttattaaaacaagctatgcaggaatcaagtgtgagacctttgaattaacgattgatgaggaacccttcgtctttgtgcctggaaattatgaaacaattctaggctgggacttgggcattcagggattgccgataacctgctggtctaaaatgtggcaagaacctctcagcccttcgctacgtcgcttgatcaaaggctacggattgtcaaacgctgaggagtggggagattttgtaaatgaatcaatgagcccattacgcaaagcgaccatcccacccatgttggtgcagaaaatggcattgccagcaggtactcgtttgattggagaactagatacagtcacgggagaattccatggtcatgttgatcaatttgaaacttttggttccgagatacggcaggcatttcagcagccgcgaagttttgaagaaagtttgcagtgggaaatgccaagaacaatcagtgccgaaaatcagtactttgcggaactgcatccagtgtctggcaattatcatgtatacacctaccaacgaatgacccaaaatgaattgcagcactggctgggacagcagggatatgatttgatgaatgaagaacagtgggaatatgtagtgggcgccgggacccgtcgtttatttcgttggggcaatgaaaaaccctgtgaggatggtgtcaaattgaccaaaaaagcattggctgagccgaacatgtttggcttgatttatccgtatgccaatggatgggagttaactgacagttcatttctaaagatggaagattggccagagtgcggcaatccattactggatacattgccctatgctagttattatcggtcacgcaaaatgttgcaagcaaaccagcagttggaccctgaaaaataccgctaccgaaaagcagttattattgatcgagaacggatttgaggattgactttttgtgaacatttccttatacttttaaagacgaaggacatggttgatttgttcattctttacagaaagtttttcaaagctgagagaaaaacaagaatcctaattgatcgctccctttggtatctgattcagtagaaatgctgacgcctgctctgcgttatcgagtctgagaggtaatgatcaacatcattgcaagtaaggtggtaccgcgtagctacgtccttgctctgcagtggtgtttttttgtttgactacccagaagcgagttcgtcgaatgaacagatatcagagagaaaggtcaccaaagaacaaaagcattccttgctcccaagcgattttatcattagaaagtaggaaaactatatgaaacacttatcaagtgccgaagttcgtcaaatgtttctcgatttctttcaatcaaaaggacattcgatcgagcctagtgcatcactcgtccctgtaaatgacccaacattgttgtggatcaactcaggtgtagcaacattgaaaaaatattttgacggtaccgttgttccagaaaatccgcgaatcaccaatgcacaaaaatcgattcggaccaacgatatcgaaaatgttggtaagacagcacgtcaccacaccatgtttgaaatgttaggaaatttttcgattggtgattacttcaaaaatgaagcaatccactgggcatgggagtttttgacttctccagaatggatggcctttgatccagaaaagctttatgtcacagtgtatccaaaagacacagaagcaaaacgaatttggcgcgaagaaatcgggttgactccagaacacatcgtagagatcgaagacaacttctgggatatcggtgctggaccttgtggaccagattcagagattttttatgaccgcggacctgagttcaacgatgtcgcagaagatgatccggagaattatcctggcggtgaaaatgaacgctatttggaaatttggaatttggtcttttcagagttcaatcatcaagcagatggcacgtatgaaccattaccacataaaaacattgatacggggatggggcttgaacggatggtgtcgatcatccaaaatgcaccaaccaactttgaaacagatctctttatgccgatcatcgaagcggttcaagaattgagcggcaattttgcatatggtgaaagcaaagcaacagatatttccttcaaagtgatcgccgaccacattcgcgcgctttcttttgctataggcgatggtgcactaccgtcaaacgaaggacgcggatacgtgttgcgccgtttgctacgccgcgccgtcatgcatggcaagaaattaggtatcgattcagcctttttatataaacttgttccgatcgtaggaaaaatcatggagagttattatccggaagtattggctcaacaagcgtttatcgaaaaagtaatccgtaatgaagaagaacggttccatgaaaccatcaatgaaggattagagatcttgaaccaagtcattgctaaagtgaaggcagatgggcaagagacattagcaggtgccgatatctttaagttgtatgatacttacggattccctgttgaattgactgaagaagtcgctcaagatgaagggttgaaagttgatcatgccggttttgaaaaagaaatggatgcacagcgggcacgggctcgttctgctcgatcgactgagctttctatgggtgttcaatccgctcttttgactgatatcaaagtcgaaagccgttttgttggctacgaaagccttgaagccaacagcgaattgttagtgatcattcaagaggaacaattgcttgatacagtaaccactggtgaagccaaactgatcttcaaagaaacaccattctatgcagaaatgggtggtcaagtagcggacactggtactgttgttgaccaatctggtgttatcgttgctgagatcactgatgtaaaaaaagcaccaaatggccagtttttgcatactgcgaaggtaactggcaacttgacggaaggggcttcttatttcttgcaagttgatcagcaccgtcggaacaaaatcatcaaaaaccacacagccactcatttattgcacaaagcgttgaaagaagtgctaggtagccatgcaaatcaagcaggttcattagttgcacctggacacttgcgttttgactttagtcattttggccaagtgactgcagacgaattaagtcagatggaacaaatcgtcaatcagaaaatttgggaagctttgccagtcgtaactatcgaaaccgacatcgatacggcgaagggcatgggggcgatggctctctttggcgaaaaatacggccaggatgtgcgtgtagtcaatgtcgcagattggtctatcgagctttgcggtggcacacatgtcgccaatacagaagatatcggtattttcaaaattgtttctgaatccgggattggtgctggcgttcgtcggattgaagcagtgacgagtcaagaagcttacgcattgctgcatgaaggagaagcacagctaaaagccattgcagggatcgtcaaatcggcacaaatcaaagatgtagtcagcaaaacagaacaattacagcaacaactgcgggatctgcaaaaagaaaatcaagcactggcgagcaaactagccaatcaacaagctggcgatgttttcaaagatgtcaaagaagtgaatgggattcgttttattgctgcaaaagtaactgtcaaagatatgaatcagttacgccaattggcagaccaatggaaacaaaaagaattatcggatgttttagttcttgctacagccaacgatggcaaagttaatctgttggctgcaatgacgccacaggcaaatgagaaaggcttgaaagctggagatttgatcaagcacatcgcaccgaaagtcggcggcggtggcggcggacgtccagatatggcacaagccggtgggaagcaaccagaaggaatcgacgctgcattgactgaagtagccaattggttagccgcaaactgattctttaacagcaaatcataaaaaaatgtataacatcaagaaatatccgaactggaattgtgtgtcagagagctgccgcgtctttttataagacgttcggtagaggatcgaaacgcgattccttcgggtattttttctgtttttgcagaaattggattttattaaagagaaattttggaatagctgaagcattcatttttagaaaaatacgttttttacatgcttttagttgttttactgatttcattcggggtaaaataagaaagacgaatttacgcttggagggaatgttatgctgcgcttctttttaaagcgaatgaaaggaaacgcaactgatcgcaccatgatcggtaaacttgcgggctatctgggattgctctcaaatgcacttctttttgtcgcaaagtttctgattggactgtcggcacaatcggtctcgatcatggcagatgctatcaatagtctgtctgacaccgcctcctcctttttgacattgatcggttttcggattgctgccaagccggcggatagggagcatccctacggccatgaacggtttgaatacattagcggttttgtggtttctttactgatcacatttgttggttttcagtttctaaaaaatgcctttgaaaaaatcattgctcctgaaccgatccgtttatcaccatggttgtttattgtgctgatcttgtcaatcggattaaagctttggcaaggtctcatgtaccgtcaattggcgaagaaaattgactctgcaaccttacaagctagcggacaagatagttttaatgatgtactcacaacagttgcggtcttgctctctgcattgattgaatggggaaccggttggcgggtggatgggtatattggcttgctgatcgcgctatacattttatttagtggtatcatgatgatccgtacctttatcaatgaactgctaggtgcacgtccgacagaagctgaaatccgtgagatggaggatcgactagatcgttatccaacaatattggggtaccatgatctgctcgttcataactatggtcccaagaatcgttttgctagtgttcatattgaagtcaatgaaagctggagtttgtcacaagcccatgaagtaattgatgcgatcgaacatgattttcaaaggaaccttcaagttgaattggtttgtcatcttgatcctgtccctatccaaaataaacagtaccggcagttgcgggaaaaagtcagacaaatcgttgagacgattgatccagagttaaggatgcacgactttcggattcacgaaaaacagtttgcttttgatttggtgatcccaaagcaaagaaattacacagatcgtgaactgcaagataaaatttatcaaaagattacgcatgaaatcggcacgtatgaggtggcgatcacgtttgatcatacttatttgttgtaggaggaaaatatgataaaaatggatatgagtgtggtttcgaccgtctttttggcgttgctgtttgtcaatacagttgcggcatttattactgtctttcgtaaaccgcgatcaattgcaagtgtttttgcctggatgatgacattagtctttatcccgggttttgggtttttgttgtatttgttttgtggtcgaggaatcgacggagaaatcatttataaattcagtgagcaccatcaaagcaggatcaatgaattaaatcaaatcatcaaagtccacaattatttctttccagagcatccatactcagatgacaaccatctattggaacggtattttaaaaatttagatgaatcccctttgacaaaaggcaatcaggtacaattttatacggacggcaaggaaaaatttgctgccttattttcagatatgcaaaatgctgaagacaatattcatgtggaatactattctttttttaatgatgaaattggtgggcagtttcttgatgtcctaattgaaaaagccaagcaaggagtagaagttcgactaatattcgatccatggggttctcccaaagcaaatcgtaaattctttcagccattaatggacgctggcggaaaggtcgtgccctttattacttcaaaaaatttgattcgcaatacacgtttgaattaccatttgcatcgcaaaatcgtggtgattgatggccaaattggctggaccggcgggtttaatgtaggggatcaatatttaggtaaaaaagcaaaatttggttattggcgggatacacatgcgcgaatcgttggaactgctagttttaccttacaggaaatctttatccgcgattggaatgcctcgattagaaatgaagcagatcaactggaatatgaagatcgctatttcattttaccgcctaaagaagaggcaggtcatgtcgatatgcaaatcgtggccgacggacctgagacggaaacgcagattcttaaaggcggcttcgtcaagatgattttggcggctgaaaaatcgatttggatccaaaccccttatctgattcctgacgacagtatgatgaatgccttggagatcgccatccactcaggtgtagatgttcgaatcatgattccctgcatgccggatcatccatttatctatcgagcgacccaacactatgccaactatttacatcgccggggagcgaaaatctatatctatgagaatggatttttacatgccaaaactgttatgatggatgataccatctgctcgtttggaacgacaaatcaggacattcgcagttatgcgttgaattttgaagtcaatgcattcgtttatgatcaagaagtcacggcgcaattaaaaacgatttttgaagaggatatgctgcagtccactttattgacagatgaaatgctggctaaacaatcttactggttgcgtttcaagcaaaacttttctcgtttgttatcgccgatcttgtaattttaaagccttagctaccccttgacgggccagatggtcggcacctttgttttgagattcgggaatccattggacaatcagtaaagtgaaatagggcagcaactcttggatttcctctaaatacttccgaaaatcggggttgttcgtataatttttgtcgattgtttgagcgacgactttactgtctgtataaagcatgatcgtctggtcttgccattctttcgttaagagaaattcaagagcatgatgcatcgcagcaaattctgcttggtgatttgtgagcgtgggtagtacaaaggcatgctgttcatgcaggtcttcccctacaatcaacagaccgccgccactaggtccagggtttcctttggttgaagcatcgagatacacttttagcatgagttgactccttctgttatgatggatataagtatactagaaattgatcgcgtgaggaaattatttatgaaacgtaactatttttggcaaccagaaccagccaccgcaattatctattggtccagttcactgatcgttttgttttacagcttgattttggcactggaaaatactcgcccttattggaaaagcaatcttgtgttggggatttttctatttcttgtctggttaggattgcagcgccgcctttatttgacggagaagaccatcaaaatcacctatgcccgcttttggaaacgagtagttattcctctcgagaaaatccaagccattgggatagagaatcatcatttgagaatcgtgaccaatgaaagaagctatacgtttgtaatgcgtaaaaaagatcttgaagtattacagacacactttgttaatctagtgcctattcttgaaagacaagagtcagaaaaataattctggctctttttttattccggtgaaaaacagggtttcaatcttcatgaaaaacggtataatagaaataggacaaacaaatatgaatgaataaggaataatagttcgggaatagagggttactgatgaaaaaagatatcgaaattgcacaagaagcaacaattaaaccgattattgacattgcagcaactatcggattacaagcagaagatctagaacaatatgggaagtataaagcaaaaatcgattggccagcaatcaaggaaatcgcgaaacgtcccaccggcaagttgatcttagttacagcgattaacccaacccctgcgggagaaggaaagtcgacagtcacgattggattggcagatggcttaaaccgtattggaaaacaaaccgtgattgctttacgagaaccatcattaggtccagtcatggggatcaagggtggtgcgactggcggaggcagagcgcaagtcttgccgatggaggacatcaatcttcattttaccggggacatgcacgcaatcactgctgcgaataatgcattatctgcgttggtggacaatcatatccaacaaggaaatgaattagggatcgacccgcgacggatcatttggaaacgtgtcgtggatttgaatgatcgcgcattaagacaagtgatcgtcggactgggcggaccactgcaaggagtacctagagaagatggctttgatatcaccgttgctagtgagattatggctattttgtgtctagcaacgaatttggataatttgaaagagcgattgagcaatattttgattggttatacgtatgataaacaacctatctacgtcaaggatttgcaggttcagggggcattagctttattgttgaaagatgccttgaaaccaaatttggttcaaaccatcgaaggaacgcctgcgttgattcatgggggaccttttgccaacatcgcccatggctgtaatagtgtcattgcaactgaaacagctctccatttaggagaatacacggttactgaagcggggttcggcgcagatctcggggcagagaagtttttggatattaaaacacccaatctctctaaagcaccagacgctgtcgtagtggtcgcaacgattcgcgccttaaaaatgcacggcgggatagataaagaacatttaaaagaagaaaatgtagcggctttagtcgcaggttttgccaacttgaaacgtcacgtgagaaacatgcaaaattatcaattgccagttgttgttgcaatcaatgaatttgtcactgataccgaagctgagatccaaatgttggagcaatgctgcaaggaaattggtgtaccaatcgctcggacgcaagtttgggagaaaggtggcgcagggggggaacttttggcgcagcaagtcgtcactgccattgatgaacaacccggcaattatcgtaggctttaccaaaatgaagagagccttcctgataaggctgccaagatcgtcaaagagatttatggcggatcaaatgtggtcttctcaagtgtggcacagcgccaattgaacgtcttcaaaaaaaatggctgggatcaattgccgatttgtatggcaaaaacacagtactcttttagtgatgatccgcagcttttaggcgcaccggctgatttttcgattacgatccgtgaatttgtaccaaaactaggcgctggttttattgttgccttgaccggtactgttatgacaatgcctggactgcctaagaaaccagcagcattgaatatggatgtcgatgcagacggcaatgtatctggccttttttaatcttattttctctccgcatctgcgaatactggatgaagaaataggttctcgaaggctccagtaatagttcagtcaatttcttataacgcaccacacttacaggtcactattgattctgtaagtgtggtgtgttgtttgcgagcgattcgtcgtctttcagtaggttttgtttggttcgttttttgttgacgctgtacataggctgcgagattcggaagagaataaaacctccctttttcttctgactttcaaaaattggaagaaataattgaagaggctgcgaggatatttgattttttgcgaagttttctaaaagtctcccatagttatctccagcattcctatttatccgtcgctcttagaaacattagaaacgaaagtaggaaacggaaaggggaaattgttatcaagctcttttaaacgagagactataaaaagaatggttttaaaaagagggctataaaagtcgctcgtttttatcttatgatttgccgcttttgggttttcaatctattaaaagactgaaagttgaatattagcaagaggcaagagacgtgtcttttgttataatataatcagtagtgcatttaaaagactgttttctttctaagaaaattaaagtatactgataaaattggagcgtataaaacgatgaaacgtaaaatcatacgaaataccggcttttatgtaatggggagtccgctggatttgctagtggatggtcagaaagtcgccagaatcaatcatcaagaaaccgtcgagctgaatctcaattctgacaaccgattgtctgtccgattttccatcctaaaaagcaaagaaattgcgttgcctgatttacacgcagaaactccattagaaataaaaatgaatccgcgactgatttctttttatgtgctgttttatattggtctgtttctaatgatcgcgtttttaactcgcagtggacagttgtccattatcctttcgggtatctttctttatttagcaggttatctatgtttaggtctttattatagcaaacaagcgtatgtaattgaggaggtaacaaatggctagcggagcagatatttttttgagtagtttcaatcgaatcgaaaaacaattgagagacgatttgggtaatcctcgtaacatgggtttttcagagatggttcgccgtctttcaaaacagaagcaaggagacatcaaaaaatacgaagaagatttattgcagatggcccaattgcggaacgccatcgttcatgaaaaaatcggtgaaaattttgtgatcgccgagccaaatcaatgggtagtgacacgaatccaacaaatcgaacaggccttgttgcagcctgaaacggtcttacctaagtttggtaaaaaagtgaccggttttgaaaaaacgttggcgctgaaagaaatcttgaagatcgtcgctcaaaagcggttttcacaatttccactctatgacaaaggacgttttgttgggttgatcactttacgtatgttaggatactggtttgctcaagaaagtctaaaaggagagatccgattagaagggcgtaaagcagaagacttgttgatcaaagacggtaaagagtccaattatcagtttgtacccgcaacaacaacggtcactgaagtagaagacctgttccataaaaatgctttacttgaagcggtattaatcacaaaaaatggcgatcctaatggaaatttattaggcatcgttcgtccgcgggatatttttaacgaagaaagtgtggaaaaaaaatgatagctttgttttttttactaagtgccataattgttggacttgatcagtggttgaagttttggatcgtcagcaattttgaattaggtgatgttcaaacgttgatcgaccatgtcttttcactaacttatattcggaataccggtgccgcatggagtatcttagaagggaagatgaccttctttacgatcatcacggttgctgctgttattgttgtaacttatttattgatccgtcatcgtaaaagcagtatatggtttcgattgggactatcctttatcttagccggagcgatcggaaattttatcgatcgcttgcgtttggggtacgtcgtggatatgtttcagctagattttatcaattttccgatttttaatattgcagacatgtcgttagtgatcggcgtgttattgatttttatctatgcgttagttgatgatgaagtgaagggaaaataaatgaataatcaaattgaagtagtaatccatgaagaaaaagggcgtgtcgataaagtattggcagatcgtctagaagcgagccgttcgcaaattcaacaatggttgaaagaaggtgcggtcacctgtcaaggggatccaattcgtgcaaattacaaagtaaaagctggtgaccagttagtgattcaagtaccagaaccagagtccctagatctggaacctgaagatattcctttgacgatcgtgtatcaagaccaagatgttgccgtgatcaataaaccgcaaggaatggtcgttcatccttcggcagggcatcctaacggaacgctggtcaatgcattgttgtatcatatgaccgatttatcttcaatcaatgatgttgtacgaccaggaattgttcatcgtatcgacaaggatacgtcagggctattgatgattgccaaaaatgatcatgcccatgaagcgttagccaaacagttgaaagacaaaacttctttacggaagtatgttgcgctggtccatgggaatatttctcacgaaaaaggcaagatcaatgcaccgattggacgttctaaagtgaatcgcaagatgcaagcagtgcaagaagatggtaagccggctgtgacacattttacagttttggaacgttttgatcaatttactttagtcgaattacagttggaaacgggtcggacccatcaaattcgggtccacatgcaatacattggctttccattagccggcgatcctgtatatggccctaaaaagactttgaaaggcaatggccaatttcttcacgccaaactgttaggatttacccatccgacaactggagaatcaatggtttttgaagcgccattacccgaactttttgaggaaaccttaaaaaaattgcgaaaaaatgattgatttttttttcaaagaactgtatagtgtgtgtaacaaataaatagctcctttaagtgtagtcccgtgaggctaagaaggaaatgagcaagcagacgactcccgcgttggagcatcgaaaacttgctggatgattgcgcatattctggatcgctgtatacagcgccagaaagtatgatcggaaaacataactcctgcctcactaggcaggagtttttttatgttcaaaattaggagggaacgaaatgccaaccaaagaagtagtagatgcagtaacaatgaaacgagcattgaccagaatcacttatgaaatcatcgaacgcaaccgagggattgatgacctagtcttagtaggaatcaagactaggggaatctatatcgcacaacgaattgctgaacgcttgaaacaattggaaggggtagaagtccccgttggcgaactggatatcacattgtatcgagacgataaaaaatcagatgaagatcctgagatccattcttctgacattccaacagcaatcgatggcaaagaagtcatcttgatcgatgatgtgttgtttacagggcgcaccatccgggcagcattagatgccatcatggatttcggtcgtcctcgccggatttcactagccgtactagtcgatcgggggcatcgagaattaccgattcgggcagattttgtagggaaaaatattccaacggcattaagcgaacaaatcattgttgaaatggaagaatctgacggttctgatcgaatcatgatcaataaagaaaacgagtaggaagaagagtgacagacacatggaaaagcaagaatttcgcaataccgatgtggtattagatatcaatgatcgcccaaaggcattgccttggttaggcttaagtcttcaacatttattcacgatgttcggagcaactgttttagtaccgatcctagttgggatcaacccaagtatcgctttagtaagttccggtttggggacacttgtttacctcgttacgacgaaaggaaagattcccgcatacttagggagcagctttgcttttatcgctgcaatgcaaatgttgatgaaatcagacggctacccggcaatcgcccaaggagctgttacaacaggactggtttacatcatcgtttctctgatcatcaaaaagattggtgctgcatggctggataaaattttgccgccgatcgtcgtagggcctgtgatcatggttatcgggttaggactagctgctaatgccgctcaaaacgcaatgtacaatggggacatctatgattttaaatttatcttagttgcattggttacattgggattgacgattttcttcaacatgtttttgcgagggtttcttggcttgatccccatcttactagggatcattggtggttacttagtagctttagctgctgggatcgtagatgtgcagccaatcattgatgctgcttggttctcattaccaagcttcgaaattccctttgttcaatacaagccaacgctacatttgaatgcgatcacgacgatggcgcctatcgcttttgtcacgatgacagaacatattggccatttgatggttttgaataaactaacaaagcgtaacttttttgaagaaccaggattaaacaaaacattgatgggagacggctttgcgcaaatcgttgccggattcgttggaggaccccctgtgacaagttatggtgaaaacattggtgtcttggccattacgagagtgcacagtgtctttgttatcggtggtgcggctgtcttggctgtcttgttaggctttgtcggaaaattgagtgccttgatcttgagtatcccaaatccggtcatttctggaatcagcttcctattgttcggtgtcattgctgcaagcgggatgaaaatcttgatcgacaataaaatcaattttgaccgcaaaaagaatttgatcattgcttctgtgattctggtgatcggaatcggcggccttgtctttacggtcggaacattcaccttatcagccatggcattagcaactgtcttaggaatcattttaaatctaattttgccagaaacatcacgcagtgaagaacaatagctagcagtcaactaaaagggaaaaactaggaggtattattcatgatcatccaatcagaaagaatcagtttaaagcatcttttgaccgttgaagcattaacagatcgagaagtgatggggcttatccgcagagggcaggaatttaaaagaggggccaaatggatgccgcaaaaagaacaatactttgctacgaaccttttctttgaaaatagtaccagaacccacaaaagttttgatgtagccgaaaagaaattaggtcttgaagtgattgaatttgactcctcaacgagttctgtgcaaaagggcgaaaccctttatgataccgtgctgacaatgtcagcccttggcgtggatgtcgctgtaatccgccacggagacgagaattattatgacgagctgatccaaagtaaaacgatccaatgcagcatcatcaatggaggcgatggcagcggacagcatcccacgcaatgcttattagacttgatgacgatctatgaagaatttggccactttgatcaactgaaagtagcgatcgtcggagacatcacccattcccgtgtcgccaaatcaaatatgcaaatgctcaaacgattaggcgccaaagtgtatttttctggcccgccacaatggtatgacaatgaatttgaagtgtatggacactggttgcctctagatgaattagtgaatcaagtcgatgtgatgatgatgcttcgggtccaacacgaacgccatgatggctcagaaagtttctcaaaagaggcttacttacgggattatggattgacagtggaacgtgcagcaaaaatgcaagaccatgccatcatcatgcatccagctccagtcaatcgtgatgttgagctggcagatccattagttgaagggctgcgttcaagaattgtcacgcaaatgacgaatggcgtgtttgtccggatggcaattttagaagcggtattgaatggcaaagcttaattataagaaacgcgaccaatagagatagaggaggaagcaacatgaaaacactcattaagaacggtaagatcatcgctgacggtgatcattgtatccctgcagaaatttggatcgaagatggtatcatccaagcgatcggaacgactttttcagaaacagggttcgatcaagtgatcgatgcaaagcaacaactgatcactccaggattagtggatgttcatgttcacttcagagagccaggatttgaatacaaagaaacgatcaaaacaggaagtatggcagccgctcgtggcggtttcactacggtttgtgccatgccaaatttaaatcctgtgccagataccgcagaaaaattacaacaagtctaccaacgtatccaagaagacgccgtggttcatgttttgcagtatgcaccgatcacagaagaattacgtagtgaagttttaacggatcaaaaagcattgaaagaagccggcgcttttgcattcaccaatgatggcgttggcgtccaaactgctggtacgatgtacttggcgatgaaagaagcggccaaaaaccagatggcattagtagcgcatacagaagatgactctctgttatttggcggtgtgatgcatgcgggtaagagagcagcagaattaggcttaccggggattcttagtgctacagaagcatcacaaattgcccgggatgtactgctggcagaagaaaccggggcccattaccatgtctgccatgtttcgacaaaagaaagtgtgcgggtcatacgtgaagctaaacaagcaggaatccatgtgacggcagaagtttccccccatcacttgcttttgatcgatgaagatatccctggcgatgaaggattttggaaaatgaatccgccgcttagaggtagagcagatcgcgaggcattgatcgaaggattactggatgggacgatcgattgtatcgcaacagaccacgcgccacatggctatgacgaaaaaatgcaaagttttttaaaagcaccatttggaatcgtcggttcagaatatgcttttcaattgatttatacgcattttgtcaaaacgggccgctttacactccaacaagcggtggcttggatgaccgagaaacctgctgaaatctttggattgaaagctggcagattaatggtgggagctccggcagatctcgcgatttttgatctagagacagcttatactgtcgattcggatcaatttctttcaaaaggaaaaaacacaccatttaataactggccattatatggggataccacccatacattggtcaatggaaaattagtttggcaaaaaggtagggggattttatgaaacgctggttgattttggaagatggcacattatttgaaggtgagggatttggcgcagagatcaatgtctatggcgagattgtctttaccactagtatgacagggtatcaagaaaccattacggatcaaagtttcaacggtcagatcatcacctttacctacccaatggtgggaaattacggtgttaatcgcgatgactatgaatcaatcgctcccacttgtaaaggtgttgtagtgaaagaacatgctcgtgtagccagcaactggcggaaacaattgaccttagacgaatttctaaagcgcaaaaacattccgggaatcgcaggaatcgatactcgggctttgactcgtaaaatccgccaatttggaacgatgaaagctagtattgtggatgccaatgatgaatttgctcatgcctttgatcaattgaaagcagccgttttgcccaccaatcaagtggcacaagtttcaacttcaaagccttatccaagtccaggaacaggacgaaatatcgtcgtgatcgattttggcttgaaacacagcattctaagagaactttctcaacgaaattgtaatctgacgattttaccctacaataccaccgcacaggaaattttggatctcgcgccagatggtgtcatgctgaccaacggacctggtgatccgaaaagcctccctgaagccatcaaaatgattcaagaaatccaaggaaaagtaccgattttcggtatctgtttaggacatcagttgtttgctttagctaatggcgctgatacttacaaaatgaaattcggtcaccgaggattgaaccatcccgttcgagaaatcgctacaggaagaattgatttcacctcacaaaatcacggttttgcagtagcagaagcatcgattgatcaagagaaactgatcatcactcatgtagaagtcaatgatggaaccattgaaggtgtccgtcatcgtcgctacccagcatttagtgttcagtatcatccagatgctgcaccgggacctcatgatggcgtacatttgtttgatgaatttttagaaatgatcgatgcatggaaggagcagaactaaatgccaaaacgtacagatattaagaaaatcatggttatcggttctggaccaatcattattggccaagcagccgaatttgactatgcaggaacgcaagcctgcttagcgttgcgagaagaaggctatgaagttgtgctggtcaactcgaaccctgcaacgatcatgaccgataaagaaattgccgacaaagtctatattgaaccaatcactttcgaatttgtctcccggattttaagaaaagaacgtccggatgcgatcttgccaacattaggcggtcaaaccggcttgaatatggcaatggaattagccaattccggcatcttggatgagatggaaatcgagttgttaggaaccaaattagcagcgattgatcaagcagaagaccgtgatctattcaagcaattaatggaagagttaaatcaaccgattcctgaatcggagatcgtttcaacagtggaagaagcagttacttttgcaactaagattgggtatccaatcatcgttcgtccagcctttacccttggcggtactggaggcggtatgtgtaataatgaagaggaattgcgagtgattgctgagaatggtctaaaactgtcaccagtgacgcaatgtctgatcgaacgcagtattgccggctataaggaaatcgaatatgaagtcatgcgggattcagccgataatgcgatcgttgtctgtaacatggaaaactttgatcctgtcgggatccatacaggtgattcgatcgtttttgcaccgagtcaaacactctccgatcatgagtaccaaatgttgcgtgatgcttctctaaaaatcattcgcgcattgaaaatcgagggcggttgtaatgttcaattagcgcttgatccccacagctttaattactatgtgatcgaagtcaatccccgggtttcccgttcgtctgctttagcaagtaaagcaactggctatccgattgcgaagctagcagcaaagattgctgttgggttgacattagatgaaatgaaaaaccctgtcacagaaacaacttatgccgagtttgaaccggcattggattacgtggtagccaaaatccctcgttggccctttgacaaatttgagtccggcgaacgccgtttaggtacacagatgaaagcaaccggtgaagtgatggctatcggtcggaatatcgaggaatctttgctgaaggctgtgcgttcattggagatcggcacacatcatattgaaatgaaagaattagaacagctttcagacaatgacttgatcgataaggtgatcaaagcgcaagatgatcgcttattttatgtcatggaagccattcgccgcggctatgccattgaagaattgaacgaaatgactaaaatcgatcttttcttcttggataaaatgctgcacatctatgaaatcgaacaagaacttgctgccaacagccaagattttacaacattaaaacgagcgaagcaaaacggctttaccgataaaaaaattgctgagttatggcagatgacagaacaagagattcgagacatccgtaaggaaaatcagttgcttcccgtctacaaaatggtagacacttgtgctgccgagtttgagtcggcaacgccttacttttatagtacgtatgagtttgagaacgagagtgttcgcagtgaaaaagaatctgttttagtcttaggttctgggccgatccgcatcggtcaaggtgtggaattcgattatgcaacagtacactcggtcaaagcaattcaggctgcgggctatgaagccattattatgaacagcaatccggaaaccgtttcgacagacttctcgatttccgataaattgtattttgagccattgacactagaagacgtcttgcatgtgatcgaactggaacaaccaattggggtcattgttcaatttggcggtcaaacagcgatcaatttggcggagccattagttgccgcaggagtcagcatcttaggtacgagtatcgaagacctcgatcgtgctgaaaaccgtgatctctttgaacaagcgttacaggcattagctattccgcaacccccaggagatactgctacaaataccacggaagcagtggcgatcgctaatcgcatcggttatccggtccttgttcgtccgagttatgtcttaggtggtcgggcaatggaaatcgttgaaaaccaagcggatctggaagattatatgaagcatgcagtaaaagcttctcccgaacatcctgttttagtcgatcggtacttagtagggaaagaatgtgaagttgacgcaatttgtgatggcacgacggttctgattccggggatcatggaacatatcgaacgagcaggggtccactcaggtgactcgatggcagtctatccaccgcaaaacctttctgaagcaacgattgccaccatcgaagactatacgaaacggttagcattgggattgaattgtgttggaatgatgaatattcaatttgttatccacgaggaaaaagtttacgtcattgaagtcaatcctcgggccagccgaaccgttccatttttgagcaaggtcacagagattcctatggcacagatcgcgacaaaagcgattttaggagaaaaattggcggatctgggctaccgtgatggcctttatccaacaccaaacgaagttcatatcaaagcaccggtcttttctttcaccaagttacaaaaagtcgatacttacttaggtccggaaatgaaatcaaccggtgaagtcatgggttcagacaaaaacttagaaaaagctttatataaagcttttgaagcagctggtttgcatattccggaattcgggaaagttctttttaccgtagcggatgaaagcaaagcagaggccgccgtgttggctgcgcgctttttcgaaatcggcttctcgatcttagcgacaaaaggaacagccgattactttgaaggctatggcttgccagtcacccgggtagcgaaaatctcggaaacagaagatgaaactgtcgttgatctcatcagaaaaggcgtgacccaagtggtgatcaatacaatggacaaaaatcggcaaaaagccactgaagacggatttattattcgccgggaagcagtcgagcatggggtgccgctcttcacctcgttagacaccgctgatgccattcttcaagtaatggaatcaagaggtttttcaacgaaagcaatctagcagtcagaaaggaaaacagctcatgaaacaagaacgaatgaccattacaaaacagcgaatgctcgcaccgcgaatctacgagatgactctctctggtgctctcgttcaagaaatgaccacaccgggacaatttctgcatattcgagtgccggatgatgcctttctcttaagacgaccaatcagtattagctggattgatcaagaaagccaaagttgtcgcatcatttatcggacagaaggggaggggaccaaacggtttgcccatctgcaaagcggggatcaactggatgttttaggccctctagggaatggctttcatatcgaagatttacaaaaagatgagactgtttttatcgtaggtggtggtatcggagttccaccactctacgaactttctaaacaattagtcgcaaaaggtgtacggacgattcattttttgggatttgctagttcggaagtcatgtattacgaaaaggcgtttcaagctctaggggatacacgaatcgcaacggatgatggcacctatggcgttcaagggaatgtcggtaatctattgttagcagccgatagcaaacctgcggctgtttttgcctgcggcaacaatggcttgttaaaaacggttgaacaacttttccaagactgtccgaatgtgcaactttcattggaatctcgcatggcttgcgggatcggtgcttgctatgcttgtgtttgtcataaagccgatgatccaacagggaccaaaagtgtcaaagtctgtgacgaaggccctgtttttcaagctggaaaggtggttatttaagtggttttagctgttgaattaccggggttgtctctcaaaaaccccataatgccggctagtggctgttttggttttggcgcagattacaacaagtattatgatatcagtcagctcggtgccgtcatgatcaaagccacgaccccagaagcacgctttggcaatccaacaccgcgagtggctgaaacaccaagcggcatgttgaatgcgattggcttacaaaatcctggccttcgagtagtcatggaagacattttgccagagttagcgcaaaagcatccagatctgccgatcatcgcaaacgtggctggttccactcaagaagattatgtcactgtctgtcaaaaaatcagtcaagcgccgaatgtaaaagccattgaattaaatgtttcttgcccaaacgtcaaacatggtggtattacttttggtaccgatcctcaagtggcgaaagaactgacccaagcggtcaaagcagtttcgcaagtgccaatctatgtcaaactatcgccaaatgtcaccgatatcgtacccattgcaaaagcaatcgaggcggggggtgccgatggtttcacgatgatcaatacgttattgggtatgcgcattgatttgaagacacgacgtcctattttggccaaccagaccggggggctctcaggcccagccatcaagccagtggcgattcgtttgatcaaacaagtggcacaagtttcttcgttgccaatcattggcatgggcggtgtgatgacggttgatgatgtgttagaaatgtatttagctggagcgagtgcggtagcagttggtaccgcaaattttactgatccttatatttgtcccaagttgatcgaagaattgcctgtacgaatggcagaattaggtatcgaatctttggcacagttgatcaaggaagtaagagaggggcattaagatgattgaacgaccaattattgctttggattttccaagcaaaaaagaaattgagctttttttagagaaatttcctaaaacagaaaaattattcgtcaaagtcggtatggaaatcttttatcaagaaggaccagaaatcgtcagctggttaaaagatttaggccatgatattttcttagacttaaaacttcacgacattcccaatactgttgagcgggccatgacacgtttggcaaatcttggggtcgcgatcaccaatgttcatgcggcgggtggtattgagatgatgatagcagcaaagcggggactgcaaaatggaaccaaggaaggccaaaatgtgccgctattgattgctgtcacacagctgacttctactagcgaagaacaaatgcagcaagaacagctaatttctgtttctttagaagaaagcgtgcgtcattatgctcaatgtgcagaaaaagcaggattagctggcgtggtttgttccgcccaagaagctgctgccatcaaggtagctaccaatcctgaatttatgtgcttaaccccaggaattcgtccggctggtagtgatgccggagatcaaaaacgaatcgtcacaccagcaaaagcaagacaaattggttcttctgcgattgttgtcggtcgaccaatcacacaatctgcaacaccttttgatacttaccaggaaattaaacaagcatggaaggaagctattcaatgacagaaatcagtaaagcaattgccaaagaccttttaacgattgaagcagtatttttacgtccaaatgaaccctttacttgggcaagcggcatcaaaagcccgatttattgtgataatcgtatgacaatgagttaccctgctgtacgtaaagcgattgccagtggtttggctgcgcaaatcaaagaacactttccagacgtcgaagtaattgcgggtacagctactgctgggatccctcatgccgcttgggtagcagatattcttgatttgccaatggtctatatccgcagcaaagccaaagatcatggcaaaggaaaccaaatcgaaggacgtatcacggaaggtcagaaaatggttgtgatcgaagatttgatctctactggcggcagtgtgttagaagcttgcgaagcagccgctcgcgaaggggcaaatgttctgggggtggcagcgatctttacctatgaattgccgcagggattaaccaactttgaaaaggcccagctgccattagtgacgttgaccaactattcaacaatgatcgatactgcattagagatggactatatcggaaaagaagatattgcattgctgcagcaatggaaacagtcacctcaaacttggactggtaaataagaacaacgaatatgcctggagtgatccaagagcatattcgttttatttttatcttttttctgatacgatttgagacgattcatcaaaagttatctggcagttgaaaggcagccagtttcaatagggaggcagttttattgaaaagaaatatggatgttccatggagttattctggggagaatggtcctgagtattggcacacattgtgtgactggtatgctgaaggagcgaagtttccattgcaatcgcccattgcgctttaccatgacgatacagaggaacctgtcgatgaggatttaagcttccattaccatcgggaacgctttactgaaaaagaatttaaaaatacgattcattttgttccatataataaagaaagttacgtgacctttcaaggcatcaattactacctaacggatattcattttcatatgccttctgagcatatcatcgatgatgagcagcaagaacttgaatttcatttggtacatatgaatgaacaaggagaaaacttagtcgtcggtattttgttccggttaacagataaattaaactggatctgtaatcagcaagatgatagtatttgggatttcaaaaaccatacccaatggtttgacccatcgatgtttttaccggaaatgacccaccattttcactatgtaggttctttgacaactcctccaactaaaggtccaatcaactggtttgtatttgactgggtaggcgagatgagtcgtcgctttattctggaatttcgtgaagaagttttagaaaacaataatcgtccattgcaggatcgaaaagaccgaccaatctacttttactgatggtctagcgaacgaaaggaaggttacgaaatggatcagtttcaagagtacctaacaaaagaattgtcagaggcacagcgaaaagtcctggagccattatttgaacatatattaactgaattcccggatttacagacccgaattgcttggaaccagccgatgtttacggatcatggaaccttcatcttggggattagcagttcgaagaaacatttctcagtctcgccagaagtgaaaacgatggccttgttcaatacccgcattgaagcaagtggctattcacaaacaaaaaacatttttcgtattttatgggatcagccggttgacgaaaagctgatcttcgacattatccgttttaatatggaagacaaagcggattgtcaaaccttttggcgctagatagtcgttctgaaaataaattttaatggccaacaaaaaagacgatttattcgtcttttttgttggtttaaatccgggatcatcagacaatagcgaccgaattatgctaaaatagtggaaaatacacgaaaatccttttaaaaataccaactattgtgaacgaaagtacaattgaatcttttttaggaaaaagagcagagtccgttaagcttttttcttttagttgttttatagtgtgagaaaggagacttctatgcatgcatgggaagccatacagaaaacattggaccatattgaagcaaatttagctgagacaatcgaaattgatgagttagccaaagttgctgctttgtcgccgttttattatcagcgtttattcacgcgattagtcaaatcctcagtcagagagtatatcaagttacgccgtttggctgtagcagccacctatttacaagaacagcaacggcgaatcattgatgttgcgctggaggttggattcaataatcctatttctttttcgcgatcgtttaaagaagtttatggcatttcaccctcacactatcagaaacagttgctcccattacaaaatttcgataaaccagatttatccctgagccatattgtggtagaggaaggggaaccgttgatcagtgaaggggtcgtcttagcaatacagcagaaaacaatggatcagccgcgggttttcaatggtatcgttggttattatcctttcaagtacggcaaaatgctaggagaaagaaccggcgtagatccagttgaaaagatttggcaagacttttttcacgcttgcgccaatcatccatttttgcgagcagagacgctcattggtgtttcctatccaggagaggcaccagcaggtcattccagttattttgtcggggcagaatctgtcaccggaagatatgagaaagacctgagccatctgacaagctggacattaccggcccgtgactatgttgtttgcagctttgagacgactaaagcacaaatgatcgtcgggatgggtaaggcaatgaggtatactcgtttttggctaaaaaaacacggtttgatagcggatggcttttttcctgagctttatcgacaatcgcaagcggagatcatgattgtcgaatcatggattccttttaaaacaagagaaaattttcaaggaggaaaaacaaatgatgaattatgaagagggcctgacattactggaagaaaagtttggtaacgacaaagacaatttgatctctttagcaacgattgcgcgcaattgcggtgaaaatgggttgccacgtcctatggtgcgggatgtcgatgcttattatgagaatggtgtcttttatgtatcgacccatgaaagctccaacaaaatccagcaaatcaaagaaaatcccgaagtttctatcgcagtctgtggcgaatggtttaccgctaatggcatcggagaaaatctaggatgggtcttggacccaaaaaatgcggaattgagaaagaaaattcgcaaggcgtttgtttggtacgatgaagttaatgatgaagcggatcaaggctgttgttttcttgccattcggttaacgaaagggacattgaatatcaatcactgggaaaagctctatcattttgattttgaaaataagcgcatgattgatcaaaatgatactttttaaccaccaacaatttaaccaccaacaatgcatcgattccattgatcagtcatctggactagcgttgttttgatgaaatggcttggctgatgtgtccgagagcttcttagcgtttccaagtatttttccataaaaaatgagccacttacggatttgttctatccacccattctcagcgattgacgagaaggctgtgtgttagagacatgtaagcgggtcattttttttaattcttcgccaacttttttggaacatcagcaaaagaacagcgttagttttgttttaaatccaaaattgtttcctcaggcgttacataataagtcgtctggttctcataaatcacaaagcctggttttgcaccatttggtttgcgaatatgtttgacttgtaccaaatccacaggtacttgtgcggagtggcggtatttcgagaagtaggcagctaattctgcggcttccaagattgtttcttcgctaggtgaatccgaccgaatgatcacatgagacccggggatatttttcgtatggagccaataatctgttttacgtgccgtttttaaagttaactgatcgttttgcagattgtttttgcctaccagaatctccgttccatcagaagagagaaaacgttccggttgcgagggcgtttgttttttccgttgtttcgtccgatttttgacatatccttgggcagcaagttcttcgcgaatcgtcaaaagatctttcggtgcggcaatttccaactgtgcttctactgattccaaataggcgatctcatcttttgtttcagcaatttgctgatgaatcagtttgacagcatttttcagcttttgataacgctggaaatatttttgcgcgttctggttgggtgtcaaggccggatctaaggcaatttttattggtttgttctcatcatagtaattagctaattccacttcgcctgcaccgcgagggacttgcgccatgaaagtcgttaaaagctcgcctttttgacggaattcttccgcattctcagattctcgcaaagtttgctgtcttttttctagcttgtgcttgtttcgcttcagctcattgtcgatttttttcagcaattcactgccttgctgttttactcggtcacggtcagctttttcatgataaaacgcatcaagcaatgcgcttagactctggtaagtttcctgccagtccgcttgttccatcagtgaatgaaaggggaccggagtaaagaattctttgttcccggattttaagtaggtaggaacaggatccgctagctcggcaaaaaattcttcccaaacggttactttttcatttggtcgttctttcagacgagataccagctcatctgccgtatccctgccaaatccttgaaaagtctgctgcaagactttgggcgacaattcttctagacgagacagcatttcaaagacttttgtttgattgagtgtatacggatcaacagtgtcttgttttggcggagcaacataaagggaccctggcagcaatgtacgatacgtattttgcgaatggccaatgtgcttgatcgtatcaacgattttaccggttgcccgattcattaagagaatcgtgctgtgtctgcccatcaattcaacgatcaaaacaaagttttgtaaatcgcctaattcgtcacgacgagtaaaatggaaatgaacgactcgatcattcgcaacttgttcaatcgtttccaggattgcgccatctaaatacttccgtaacatcatcaaaaatgttggaggtgtttctgggttggtataggtagcttgtgtacattgaatccgagcatagctcggatgggcagatagcaataatttgtgatttttcccttgagaacggatcacgaagatcacttcgttctcataaggctggtgaattttattcactcgaccattaacgagttcattttgtaattcctgaaccatcaagtgggtaaagatgccatcgaaggacatttgtttccctcatttctgttttatcaaacttttttctcattcaatttttgaggtcaagacatttgaccgataaaggcaagtaaaattaacgaatccagattgaatcgagtagttctattataacgaaaagaaaccagaaagaccaatcctgatccaagcaggacataccccatcagatttaggatatattgaagcattcactaagagtccgttttattgttttgtgcatcctttagggctttttcaatctccatattcaagaaataggaaatgactgttcgaatgactacgactactgctaagcggacgatatcggcaaatgtcggatggatgatggtctcaatgatatctgcagcaatcaagatctccaaaccaagcaaaacataactgccgagaaaatttcgaataaaattgttttctctggccgcactcatacggtctttcgcttttatttcaaaacgaataaaatcaaaaccagcttttacaactccccacacaagcactaaaattgaaagcagattcagacaaacgacgattaaatctaaaatggggattgcattatccattaaaagttcagcaagatcagccatgactaactcctttggttttttctctatcttatcgaattttacttaatatgggaagttatatgggaagtttcttgacgctccaaagacatcttgctagtataaagataagttgatggcagatgaaaagggcggggtttaggatggagcgattcgagaatttttttcagttggtaaaagtgaagatgcgagaaagctgggaagcttttgtccaaagtgtctaccaaaatcagcgtaagaccatgtattatttaggtacaggtattctacttgctgtgctatttgctgtagtgattattacttctcaaacgaggatcaaaacatcgctgatccacaagatggcttttgaagaattgccttctgataagatcgaaccattagaatatgcaaaagcagatcaaacgattcgggacacaaaagccatttcggtgatgtttagtaaaccgaatggcgaagagttggcagaagtgtttcaattgtttaatgataaagagagtgaaatgaatcgatccgtgtactattatccgatcgtatatgatacacagtcttttttagatacttacggtgtaaaagcaaatgaaatcacctttgttttctttgaaaacgggcaagagaaaaatcggtttacttatcaatcacttaaagatcctgcagaagaatttattcctgaattgaatcggttaccaatgtggaatattcgcaaattagcagagtaagaaaaaatctgacaatttgaataaaagttattgacgttcttttattaatacgctaaactaagtgaaacaaagttaaacaaatggaaaaaggaggagctaatatgagactattttacgcattgcaatcaaattcatggcaaaactggcgtagatagttgtattggtggacctcaatccatagatacaactttttagagaaccttctaaagtgctgtatctatgctggtaaatgaatctttcaccgcatagaacgattagtctatgcggtttttgcttgaagcaactgccggattgtcggcagttgctttttttagttctcaagtataaacaaaaaaatgagaaagaagcgaggagagttaaaaatgaaaaacaaaggattaattgctgcagttattgttatttttggatttttattggcggcttttgggtaccaaatgggagcaaaacaaacaggagaatccgctgaacaaccgacggatcaaacagcaaaaaaagaacacaaaacggtgggtattctgcaatttgtcagtcatgaagcgctcgacgaaatcactcgaggcgtcaaagaagggttaaaacaatcgggttataccgaaggggataatttaacaatcgaatttcaaaatggccaagcggatcaaagtaaattagcgaccatgagtcagcaattgctgaacaaaggcgctgatgtattagtagggatagcaacacctgctgctcaagcattggctaatactactaaggatgtgccaatcgttttaggcgcggtgaccgatccggttggggccaatctagtagctgatatggataaacctggaggaaatatcactggagtatcagataaaacaccagtagctactcagtttgaattagcccaagaattgatgccagaggcaaaatcagttggtatcttatattcttcaacagaggataactccaagtatcaagcagcagaagcagaagcggccgcagaaaaatatggcttgacgtcaaaaaaatatgcagttccttcaagcaatgaaattgctcagacggtacaggtgatggcagaaaccgtcgatttcatttttatcccattggataatacgattgccaatgcgatgcagacggttgtcggagaagcaaacaaaacgaaaacaccaatcatcacctctgcagaaaccatggtgcaacaaggtggcttggcgactgtgggtcaaaatcagtttagcttaggtgtccaatcaggtaaaatggcagctgcgatcttaaaaggggaatctgatccagcaacaacccccatctatacttttaaagatggcgatacggtcattaatgaaaagcaagctgaatttcttggcatcactattccagaagcactcaaagaaaaagccagactcatttctgacgaagcgaccgaaacaacatcaagcacagactaaccattgaaacagctgctcttaaaagggttatagcaatgctaactaacgtttcataaagaaacaagaaaaaaatctattgcttttaaggaatatgtgtcctgacagaaacttcttgttgtcaggacaggggtttggaagacagatagaaaaacaagtaacgaggaggaaaaaaaatgatcgtttcagcgattgggcaaggattcctttgggggattcttgggttaggtatttttatgacgtatcgaattttaaattttccagatatgactactgagggctcttttcctcttggcggcgcggtctgtgtgactgctatcacgcaaggtgtctcaccgatagtagctactcttttaggggttggtgcggggatgtgtgccggattagtaactggtcttttatatacgaaaggcaagatcccagtaattctagctggaatccttgtgatgtcgggactaaattcagtgatgctgtttgtgatgcgctcgccaaatctttctctattgaatcaaccaaaaatccaagatttcttcacgaagctaaatttgcctaattactttgatactgtgttgatcggattagtgatggtattagtgatcggggctgtcttgctattctttttccataccaatcttgggcaagcctatattgctacaggagacaacgagcatatggctaaatcactagggatcaatacagacactatgaagatcattggcttagttgtttccaatggagtgattgcattatctggggcattgatcgcccaaaatgatggttacgcagatgttagtaaaggaatcggcgtcattgtaatagggttagcatcgattatcatcggtgaagtattatttggcgaactaacattattggagcggctcgtagcgattgttgtgggcagtatcatttatcagctgttgatcctatttgtgatcagagctggctttgatactacttacttaaaaatcttttcggcgatcgtcttgacgctttgtctattgatcccgcaattcaaaaatgcactgcacttgcggacgggtttcgaaaaggaggaagaatgatgttaacgatcaataaagcaaccaaaatcattggcaatggtcctcatgaaaagaagacgctcttacagaaagtagatttaaaactgcaatcaggggaatttgtgactgtagtcggcggcaatggtgctggaaaaagtacattgtttaattgtatatccggttcactgccacttactagtggtcagatcttgatcgatgaccaagatgtcacgcagttgtcagaagaaaaaagagctgcttacttgtcaagagtctttcaagaccctaaaatgggcactgcgccgcgaatgaccgtcgctgaaaatctattgttggcgcaacgtcgtggacagaaaaggaatttgcatttgcgccaattacaagcacaaaaagatgtttattaccaattatgtcaagaagtgggcaacgggctcgaacaacatttggatacaccaacaggaaatttatctggtgggcaacgccaagcattgagtcttttgatggcaacgatccagaccccaaaattgctgctcttagacgagcatactgcggcattggatccgaaaacgtctaaacagttgatgcaaatcactgcagatcgagtggaacaacaacagttgacttgcttgatgatcactcatcgcatggaagatgctctaaaatatggcaaccgattgatcttgcttcgtaaagggcagatcgtgaaagatttatccgcagcagaaaaagcgcagcttcgtttgcaagatctattactattctttgaagacgacctttagaaaaccgaatctaccagtgaaaatcgcagaaaaaaataaatgaaaaccagtgaaatgaaaaaaataagaaaaaatcattgacaactttcaaagttcaacctatacttaggacaatcttacatcagtttggagcgaacaatcatgaaacaattgcaagagaacccctcacaactgaataaatattactttagctattttagataggtttgtattcatgaaagacatgggtacaaacactcgtttgtatctatgatggctaaggcatttcgtaatgactttaaagccacgtagatcgtaaaatctatagtggctattttttatattcacatatcagctgatatgtaatgtttgaaggtgttcactgtagattctatcaatttacagtggacatctttttttgttgaaaggaatgaataggatgaaccaattaatcactggacacacccgtttagcagcgttgtttgcgaaacctgccaaacacagtatctcgccagccatgcataatctttcttttgaagatcaaaaagtggatgctgtctatctagcttttgatgttgatccagaaagtttagcagcaagtatccaaagtattcgtcagcttgatttgttaggagtcaatttatcgatgccgcacaaaatggcagctgttcctttagtcgatgaattatctcctgccgcagaactgattggtgctatcaatacaatcgtcaaccacaaaggtcatttgatcggtcacaatacggatgggattggatttatgcgagcgctaggagacatcgaggtctcgattattggcggtaccatgacagttatcggcgctggtggagctgctacagcaattattagtcaagctgccttagatggggtagaaaccattcatgtttttaatcgaaacgatgaattttatccagtgattgaaagcaagctgcaacaaatcgcggcggctactacctgcaatatcacacttggtgatctagatgatcagcaagcattgggtctggcgatcaaagagagccaattgctagtaaatgcgactggtgttggaatgaagccgcaggaagatgccagcccattaaaagaccgcggaatgttacgagaatcgttggcagtttatgacgtgatctataatccgcgagaaacacggctgttgcgtgaagcaaaagccgcgagagcaaaaacagccaatgggttaagtatgttgctttaccaaggcgcggcggcttttgagctatggactgataaaaaaatgccgattgagaaagtcaaaacactgattgaaaaaatgtaaaaaaactaataactatgaaggtaggaagaaaaaatgatcgtaattatgaaaccaaatgccacggcagaacaagtagaagttgttgtgaaacgaatcaaaaaagaaggattagatgtacaggtcaatcaagggaaggaacaaatcgtcattggacttaaaggagatacgcgtctgatccaagatgtcgcttttcgcagctacgatggtgtagaagacgcaattcgtatttccaatacgtacaaattgacttcgcgggaatttcatccgcaggacacggtagttgatgttgatggtgtcaaaatcggagatggacatttcgtaacaatggctggcccatgttcgatcgaaggattagaacaaatccgtgaatgtgcacggatcgccaaagctggcggtgctcaaatcttacgaggaggtgctttcaaacctcggacctctccttacgctttccaaggtctggaagaagaagggctgaaatacatccgtcaagctgctgatgaaacagggatgaaagtcatcactgaagtaatggacgaaggacatatcgatatggttgcggaatacagcgatattttgcaaatcggtgctcgtaacatgcagaatttcaaactattagcggctgtcggtaaaacaggaaaacctattggattgaagcggggaatttcaggaacaattgatgaatggttgaatgctgcagaatacattgctgttcaagataaaagtgaagtgatcttcattgagcggggaattcgaacatacgaaacagcaacgcggaatacattcgaccttagtgctgtaccgatcatcaaaaagttgagtcatttcccaattatcgttgatcctagtcatgggacaggtatctgggatctagttccgccaatggctagagctggggttgctgcgggcgcagacggcatgatcgttgagatccatccagatccggcaaatgcttggtctgatggtcctcaatcattgaacgaaaaaacctacatgaatatgatgaatgaagtccatatcatggaaaaagcgatgaaagaaatcaaagcactgcaaaaataatcgtcgtttttcagctgagagtgacagctatttcagaagaaatcaagtcattgtgaagtctaaaaaaaggagtgtaccatttgatgttacacataaatttagcagaacattcgtatgatattgtcattcaacgaggtgcctttcaagaagtagggaaatgggtcaaaggactttggcaacctcaaaggattgcagtgattacggatagtaacgtttccccaatctatggacaagtcattattgatgcgcttactcatgaaggatttgcagcaaaattacttgttgttccagcgggcgaaaagagcaagtctcttgagcaagcgacgattctttatgatcgtttagcagaacttgggttgacccgaagcgatggaataattgcgctgggcggcggagtaatcggtgatttagcaggtttcgtggcttcgacctatatgcgaggggtccattttcttcagattcccacgactttattggcgcaagtagattctagtattggcggcaaaacagctgtcaatactggaaatgctaaaaatttggttggaacctttgcccaacccgctggtgttttgatcgatccagaacttttacgatcattaccactttatcgcgtacaagaaggaattgcggagatcattaagtcggcagcaatcgctgatgaccagctatggcaaaaactagccgaattgcaagatgaggcggcattattggaccatgcagaacaagtgatcaccgcggctttaacggtcaaacgaaaagttgtcgaggaagaccctttcgatcatgacagtcgcttgatgttgaatttcggccataccatcggacatgggctagaaaaaacagcagcgtttgaaatcagccatggtgcaggagtagcaatcggcatggtgatgatcacccaacacgcggagtccatcggattatctccaaaaggaactacggcccaattaatagaaatgatcagcaagtttcatttgcctactcagtcagaatcgcttgacaaagatcagttgtatcaagcgatcactcatgataaaaagacccgaggaaaccaattgaagattattttgttagaaaaaatcggtcaagcgaagatcgttacgatccctacagaagaaattaaaaattatttataaaaaagagaggaagcgacggatgatgcgttatattacagcaggtgaatcccacggacctgaattgaccgcaattattgaaggtctaccagcgggattacccttaacagcagcagatatcaatcacgaactagcgagaagacaaacgggttatggccgcggcggtcgcatgctgattgaaaaagaccaagtccgtattacttccggcatccgacatggaaaaacattagggtcgcctgtgacattggtggtggaaaataaagactggaaaaattggacgaaagtgatggcaatcgaggaagttcctgaaaaagatcggaaattacgacgagtggctcggcctagaccaggacatgcagacttggtcggaggcatgaaataccgtcatcaggatttgcgaaacgttttagagcgttcctctgcgcgggaaacaacgatgcgagtggccattggtgcaattgccaaaaaaatcttaaaggaattagagattgaagtggctggccatgtgacaatgcttggcggcataaaagcagctattcctgatggtttgactgttcaagaaattgccgagcgctccgaagcatctgaagttcgggtgttggatccttctgtcgaagaagaaatcaagcaattgatcgaccaaaccaagagaaatggggatacgattggtggcgtcgtagaagttctaatcgggggtgtccccgctggtctaggcagttatgtgcagtgggataaaaaattggatgccaaaattgcgcaggccgtggttagtatcaatgcatttaaaggtgttgaatttggtgtcggatttgaagcaggagtcttacccggttcgcaagtgatggatgaaatcctctgggatcagcaaaaaggatacacgcgtcgcagcaataatttgggcggatttgaaggaggaatgacaaatggagaaccgattgttgttcgtggagtgatgaagcccattccaacgttatacaaaccgttgcaaagcgttgatatcgatagcaaagagccctacaaagcaagtgttgaacgttcagatagtacggcagttcctgcagccagtgtggtttgtgaaaatgtcgttgctacagtagtagccaatgaaatactcgaaaaatttccgagtgactcctttgaagaattacaaacagctgtccaagaataccgtgactacttgcttcattactaaaattcattactaaaagtagtagagtttatcccactactaaaaaatatcttgagaaaaaggaaacgagggacattccaatgtcacaaaaaatcatgatcgctggtctaggattgatcggtgcttcgttggcaaaatgcatcaaaaaagctgttgctgacagctatctgattggctgggatcattgtgaatcgaccaatgaaattgccatacagtcacagattgttgacttcgtgccagcttcatttactgaaggagcgatccaatcagatatcatcattttggcacttccagtggagatcacgaaagcttatttggcagaattgggaagagtaactttaaagtcaaatgtcttagtaacggatactggtagtacaaaagcagagattgttcaatttgcgcagcaattctcctttgattttattggcggtcatcctatggctggctctcataaatcgggtattttagcagcagatgagaatttattcgaaaatgcctactacattttcaccccgactactagcaaccgcatgaatgaactgcagcgattgtttcaagggaccagagcaaaatacgtcgaattggcaccaaacgagcatgatcaaatcactggaatgctaagtcatttacctcatattattgcttccgggttagtcaatcaggcgaatacgtttaatcaatcacagcctagggctcagcaactagccgcaggagggtttcgggacatcactcgcattgcttcttccgatccccgcatgtggacggatattttattaagtaatcgacaggagcttttgcagctaatcgcaacctggcaaaaacaaatggagcaagtatcacagtggttgctgaccaaagatgaaaaagcaatattccgtttttttgaagatgctaaagaaacaagagaccatttacctatccaccaaactggagcaattccagcgttctatgatctattgatcgatgttccggatcatccgggtgtggtagcagaggtcacccagctgttaagcacgggcaatctctcattgatcaatttaaaaattttagagacgcgtgaagatatacttggtgtcttgcagatttctttcaaaagtcaaaaagagctgcagcaagcccagcagctgatcactgaaaatacgacctatcaatgtcggataaaataggagaacaatgatgaaactacttaaagctaaccacctaagaggcacactgacagtcccttcagataaatctatttctcaccgcagcatcatgtttggtgcattagcagaagggacgacgacggttcgtaattttttaagaggggaagattgtcttagtacccttcacgcttttcaagaattgggagtccccattcaagatgacggcgagacgatcacgatcactggtcaagggtttggcggtttgaaagctgctgaccgttcgattgatgtaggaaattcaggcacaacgattcgtttaatgatgggtattttagccgggcaacctttcacgactactttactgggggatgattcgttgaatcagcgaccaatgaatcgagtgatgttgccattgaatcaaatgggtgcgagacttaacggcagcaatgaaagtgagtttccaccgattactattcaaggtacacgcgatttaagcccaatcgattattcaatgcctgttgctagtgcacaggtcaaatcagcgttactttttgccgcattgcaagcagagggtacctcccgaatcgtcgagaaagaaccgagccgcaaccatacggaagaaatgattcgtcaatttggcggcgagatcacggttaaaggaaaggagattcaaattacaggtcctcaatcctttgttggacaagaagtgattgtaccaggtgatatttcttcagctgcttttttcttaaccgcaggagctgttttacccaatagtgaaatcacgctagaaaatgttgggattaatccgacgcgaacaggaattttagatgtgctggaacaaatgggtgctcagatttcactgacagcgatcgatcagaacaatcaatcagctacgattactattcgttcttctgcattaaaaggaatcgagatccaaggcgcgatcattcctcgactcattgatgaattaccaatcatcgctttgttagctacacaagctgtcggccaaacggtgattcgtgatgctgaagaattgaaagtcaaagagacgaaccgaatcgatgcgaccgcagaagaattaatgaaactgggagcagatatcacgccaacggaagatggattgattattaatggtccgacgccccttcatggtggtaacgtgtccagtcgcggcgatcatcgaattggtatgatgctgcaagtagctgctttattgacgcaagaagatgtggaattagaacaggcggaagcagtagcggtctcctacccccacttctttgaggatctccgccaattaactggaggtgatgttgaatgaaaggaatcgttttgatcggttttatgggtgctggtaaaacaactattggccgcttgttagcagaacgattacagttggcacatgttgattttgacgatctgatcgttgaatcgatcggcatgacgatccaagactattttgatcgttacggggaagccgcttttcgagaaaaagaaacggagattttgactcattcattaacacttgatcaagtgatctctactggtggcggcatcatcctaaaagaagaaaatcggcaactattgcagcaatttccgaaagtcgtctatttaaaaacggagccagaagaattgctcgatcggttgaaaaaggatacggtcaatattcgtccgcttgtcgtttcgaaatcgccggcagaaatcattgatatttatcgtccaagaatgccactatacgaagaaagtgcgacagtagtgatcgataccacccgcaaatctccagcagagatcgtgactgaaatcattcaaaaagcaggtgaataaatgaagattggttatctaggcccaaaaaactccttcacttatcgagccgcctgtgaatcttttttaaatgaagaaatggttccttttggatcgatcccattatgtattcaagcattagtagcaggggacatccaacgagcggtagtccccaatgaaaattcattagagggttcggttcatgcaacaatcgatacacttttccgacaaaaggaactgatcattgaacaagaagtgattttgcctatcaaccatcagctactgaccattcagtcaggacagccgatttccaaaatcatttctcatccacaggctttggcccaatgtgcggagtttttgcaacataacttcccagatgttcctattgaagcggtggcatcgacgactgctgctgccgtctttgtcgcagagcatccagcggagccggtagcagccattgcttccaaagaagcagcccatgcttatggtctattcattcaggaaaaaaatatccaggatacgactagcaaccaaactcgtttttggatcttgcaaaaagacacaaacgaatcgagcgttttccatgataaggcaacgaaagccacgatctatgtgaccttgcctaccaatcgaccaggtagtctgcatcaaattttggccgcttttggctggcgcggcattgacttgagcaaaatcgaatcccgaccattaaaaacgagtctaggggaatatttttttgtgatagatttagtgctaaatcagccttgggccttggttgagaatgccttagaagaaatcaggatgttaaattgtaatgtccatcttctaggttcgtatgctgtgaagaaaataggtgaaggaaatgaaagagaggaaaatcagtccttgcgaggatgctgatttattagctaaactttatcaaagtgttcaagaggtccatcatcaattgatacctaacgttttcaaatcctttgactacgaggcattccgcgacttgttacaggatttgcttgccgcagaaacgcatcatttttttgtagcctggcaaaaacaaccttgcggatttattcatctaaaagagattgagttatcggatacaccgctgatggtctctcaacgtcgacttgagatcgaagcgttatcggttgaaaatgcgtaccagaagcaaggggtcggtgaagccttattaacccatgccgcagattttgctcgagaaaagcagtttgcaaccctcactttgaatttctgggccaaaaaccaagtggctgatttttaccaacgaaatggttttcaagttgaacgttacagagcaagcaagattttatgagccgcttttcatctttctatcaaaaagttgctaggaaaatcttaaaatttaaaaaaatagctttctttctttttttcgtaaggtattcttataagaaagaaaagctttttttatttggaggaaactgtcctatgagtcgaatggaccgcaacaaaaaattgcatgaacaattagcgaaagaagagcaacgagctgctcataaagaaacgatctttgctcgtcgagaaacaaaatctgtgagaagacctcaaaaggaagaagagtattcagcagaaaacgattttgcacaacaaagggagaacgaccaaacaagtcagaagcggtcttctggcaatcattcgtcaaaaaaaacaacccttcagcggccgaatctgttaactggcaaaaaaaacaagtcaaaatcctttggtaaacaaaaggatttcggcaacaatggtcagtcagttaacaagaagccagcgaaacaagagcagaaagtaaaatcaaaagaagctaaacgtaagaaacggccaattttgcgtttcatcctgtatgtgctagtgtttgtacttgcttactcgatcgtggcttttgtggcagggcagcaggtggccaaaagcgatgcacaagtctcagagacggaaacgtttgatggtgtagcatctgcgaacggagcaaaaaatattttgcttttaggaagcgacagccgtaaaggcgaaactggtcgtgcagacacgatcatggtgctgcaattggatggcccttcaaagaaaccaaagctgctttctttcatgcgggatacgctagtcacgattccgggatatggagaaaacaagatcaatgcagcttatgcatttggcggggcagagttagttcggcaaacgttagctgaaaatttcggaatccaaacgaattattatgtcaaagtagactttcaatctttcgaaaaagtgattgacaccctttttcctagtggtgtaccgatcaacgctgagaaagatatgagtaaaaaccttgaagtccctatcaagaaagggcaacagaatatgaacggtttagaattattgcaatatgcgcggttccgtatggatgaagaaggcgactttgggcgtgtgcgtcgacaacaacaagtgatggatgctgtgtttaatgccatgaagaatcctttatccatcgttaaattgccatacgcagcagggaaagtcctagggtatgcttctactaatctgccagttagcttcttgctgagaaacacattttcgattgccaaaggcgcagggggcattgatcgcttaactgttcctgtcgatgattcatggcagtatggctcaacctatgaagcaggaagtgtgctggtcatcaactttgataccaataaacaagccatcgaaagtttcttaaatcagtaagtttaactgaaaactttttgaaaagagttttgaaagcttactggtttatgctatattattaatgacgtttgaaatatgttgaaacgaggaaaagaaatgaaattagccgttgttactgacagtacagcttacttgcctgaacgcatccaggatcacgctgacttgttcgttatcccaatacctgttattttagatggaaaaagctataacgaagggatcgacattcagccagatgaatattactctttgctgaaaaacagtaaagaatttcctaaaacttctcaacctgtccttggtgaagtgattgcattatacgaaacccttgcccagaaaggttatgatacgatcttaagtattcacctttctagcgggatttctggctttatcaatacgttatatggtatcaaagatgatatcaaaggcgcg
